(19) United States
(12) Patent Application Publication
(10) Pub. No.: US 2013/0172238 A1
(43) Pub. Date: Jul. 4, 2013

(54) METHOD FOR SELECTIVE OLIGONUCLEOTIDE MODIFICATION

(71) Applicants: Andreas Mitsch, Lappersdorf-piehlmühle (DE); Karl-Hermann Schlingensiepen, Regensburg (DE); Bernd Betzler, Aalen (DE); Frank Jaschinski, Obertraubling (DE); Anneliese Schneider, Feldafing (DE)

(72) Inventors: Andreas Mitsch, Lappersdorf-piehlmühle (DE); Karl-Hermann Schlingensiepen, Regensburg (DE); Bernd Betzler, Aalen (DE); Frank Jaschinski, Obertraubling (DE); Anneliese Schneider, Feldafing (DE)

(21) Appl. No.: 13/703,260

(22) PCT Filed: Jun. 10, 2011
(86) PCT No.: PCT/EP2011/059744

§ 371 Date: Mar. 15, 2013

(30) Foreign Application Priority Data
Jun. 11, 2010 (EP) 10165625.4

(51) Int. Cl. C12N 15/10; A61K 31/713; A61K 45/06; C12N 15/113

(52) U.S. Cl. CPC C12N 15/10; C12N 15/1136; A61K 31/713; A61K 45/06
USPC 514/3.7; 536/25.3; 536/24.5; 514/44 A; 514/19.3; 514/19.8; 514/16.4

(57) ABSTRACT

Method for producing a modified oligonucleotide, wherein at least one polymer, preferably polyalkylene oxide, and/or a compound is covalently bound to the 5′-end or the 3′-end of the oligonucleotide via native ligation forming a native ligation site, with the proviso that the polymer and/or the compound is not a protein or peptide, if only the 5′-end of the oligonucleotide is modified by binding of the polymer or compound via native ligation. The invention is further directed to a modified oligonucleotide obtainable by the inventive method as well as the use of such modified oligonucleotide for the preparation of a medicament for preventing and/or treating a tumor, formation of metastasis, an immune disease or disorder, a cardiovascular disease or disorder, and/or a viral disease or disorder.

[0001] The present invention is directed to a method for selectively modifying an oligonucleotide, preferably an antisense oligonucleotide, wherein a polymer, in particular a polyalkylene oxide and/or a compound is covalently bound to the 3′- and/or 5′-end of the oligonucleotide, wherein the 5′- or the 3′-end is modified via native ligation forming a native ligation site, and optionally a further polymer and/or compound is bound, preferably to a cysteine residue at the native ligation site of the oligonucleotide conjugate.

[0002] Nonimmunogenic and water-soluble polymers have been widely used in biomaterial, biotechnology and medicine (Zhao 1997). In the area of drug delivery, polymer derivatives have been widely used in covalent attachment to proteins for example to reduce immunogenicity (Chirila 2001), proteolysis, kidney clearance and to enhance solubility. Polyethyleneglycol (PEG) for example is a widely used polymer that has been attached to more or less hydrophobic drugs to enhance solubility, reduce toxicity and alter biodistribution. A further aim of linking polymers like polyethyleneglycol to drugs is to enlarge the molecular weight and increase the body halflife time of the drug. In addition, a polymer is suitable as carrier in a pharmaceutical composition or is linked covalently to a drug to enhance cellular uptake and/or to direct the oligonucleotide to a target. Hence, polymers bound to an active agent often result in enhanced penetration and retention of the active agent in a cell or body system, and allow for example directing the agent specifically to a tumor, tumor tissue, or metastasis (targeting) to increase the success of a therapy.

[0003] WO 2008/077965 A2 describes oligonucleotide conjugates, wherein an oligonucleotide is connected to a polymer, preferably a polyethylenglycol. These conjugates are produced based on oligonucleotide synthesis, wherein 3′->5′synthesis and 5′->3′ synthesis of the oligonucleotide on solid support are varied depending on the type and/or molecular size of the polymer, which is conjugated with the oligonucleotide.

[0004] Dawson et al. (Science 1994) originally described native ligation as a method for coupling unprotected polypeptides and/or proteins, respectively, to construct a large polypeptide or protein. Later native ligation was adapted to the coupling of peptides and oligonucleotides resulting for example in peptide-oligonucleotide hybrids, wherein the peptide is bound to the 5′-end of the oligonucleotide (Stetsenko D A et al., 2000; Pierce T L et al., 2005).

[0005] It is an object of the present invention to provide a method allowing multiple specific modification(s) of an oligonucleotide in a broad range with a polymer, which is preferably not a peptide or protein if it is bound to the 5′-end of the oligonucleotide using native ligation, and optionally further modification of the oligonucleotide with a compound, wherein the polymer and/or the compound is bound to the 3′-, and/or 5′-end of the oligonucleotide, and/or to the cysteine residue of the native ligation site forming an oligonucleotide conjugate of the invention. Due to the mild reaction conditions, in particular of the native ligation, of the present invention, the method is very efficient, characterized by a very low number of unwanted side products, and the products prepared by this method can easily be used for clinical administration. Moreover, the present method provides the platform for a high variety of conjugates with different polymers and/or compounds at different positions of the oligonucleotide.

[0006] Accordingly, it is a further object of the present invention to provide an oligonucleotide conjugate according to the inventive method.

[0007] Furthermore, it is an object of the present invention to use the oligonucleotide conjugate of the present invention for the preparation of a medicament for the prophylaxis and/or treatment of a disease, wherein the oligonucleotide of the conjugate hybridizes or interacts with a factor involved in the disease.

### SUMMARY

[0008] The present invention refers to a method for highly selective modification of an oligonucleotide, preferably an antisense olignucleotide, wherein the 5′- or the 3′-end of the oligonucleotide is modified via native ligation. The oligonucleotide is further modified at the 3′-end, and/or at the 5′-end, and/or at a cysteine residue of the native ligation site. The modification of the oligonucleotide is preferably based on the binding of a polymer and/or a compound to the oligonucleotide at the 5′-, 3′-end of the oligonucleotide and/or at the thiol function of the cysteine residue, i.e., the native ligation site. In one embodiment, the 5′- and the 3′-end are modified via native ligation, wherein the 5′- or 3′-end is modified first, or both ends are modified in parallel. In case of the 5′- and 3′-end modification of the oligonucleotide via native ligation even two additional native ligation sites are created, which allow the combination with one or two additional polymers and/or compounds.

[0009] In a preferred embodiment, a polymer such as polyalkylene oxide for example a polyethylene glycol (PEG) is connected to the 5′- or to the 3′-end via native ligation with the cysteine residue at the native ligation site. This first step results in a conjugate comprising an oligonucleotide and a polymer. In a next step, a compound such as a small molecule, an antibody, an antigen, an enzyme, a part of an antibody, antigen or an enzyme, any peptide, e.g., an internalizing peptide, an aptamer, a chromophor, a marker, preferably a fluorescent marker like FITC, biotin, a hormone, a signal peptide, a lipid, a fatty acid, a sugar, an amino acid, a receptor, a part of a receptor, or any ligand of a receptor or binding molecule, or a polymer for example a polyalkylene oxide, is connected to the native ligation site, preferably to the cysteine residue of the conjugate. Alternatively, a polymer or a compound is connected to the 3′- or the 5′-end of the conjugate. In a further alternative embodiment, a polymer and/or a compound is connected to the native ligation site and to the 3′- or 5′-end of the oligonucleotide. The compound and/or the polymer is permanently bound to the oligonucleotide or is detached from the oligonucleotide, preferably if the modified oligonucleotide, i.e., the conjugate, reaches a target and the conjugate binds to the target. In a preferred embodiment, the protein and peptide, respectively, guides the oligonucleotide to the target, binds to the target and the oligonucleotide, preferably comprising further modifications (polymer and/or compound), is split off from the peptide or protein.

[0010] For example the combination of a modification of the 5′- or the 3′-end of an oligonucleotide via native ligation and the modification of the free 3′- or 5′-end using a linker such as an NHS-ester offers a surprisingly simple and reliable method for the production of symmetrically or assymetrically modified oligonucleotides for example a polyalkylated oligonucleotide, preferably a pegylated oligonucleotide. A further advantage of the method is the formation of an additional functional group at the cysteine residue, which allows a further modification of the modified oligonucleotide for example with a further polymer, a small molecule, an antibody, an antigen, an enzyme, a part of an antibody, or an enzyme, any peptide, e.g., an internalizing peptide, an aptamer (based on nucleic acid, protein, or peptide), a spiegelmer, RNAi, shRNA, microRNA (miRNA), a chromophor, a marker, preferably a fluorescent marker like FITC, biotin, a hormone, a signal peptide, a lipid, a fatty acid, a sugar, an amino acid, a receptor, a part of a receptor, or any ligand of a receptor or binding molecule, or glutathion.

[0011] In an alternative embodiment, the oligonucleotide modified at the 5′- or 3′-end via native ligation is temporarily or permanently connected to a solid support via the free 3′- or 5′-end of the oligonucleotide, or the native ligation site, preferably the cysteine residue of the native ligation site for example to thiol-sepharose. This embodiment allows further modification of the oligonucleotide at the 5′- and/or 3′-end, and/or the native ligation site, and/or at any site, which is not connected to the support. Alternatively, the connection of the modified oligonucleotide to a solid support forms the basis for a test system such as a kit, and/or allows purification of the modified oligonucleotide. An example of a solid support is a magnetic bead, which allows for example an easy isolation of the native ligation product via magnetism.

[0012] The polymers and compounds, respectively, bound to the oligonucleotide are either identical or differ for example in chemical structure, molecular weight (size), and reactivity. Hence, the method of the present invention results in a high variety of different oligonucleotide conjugates having a broad range of different characteristics allowing adapting the oligonucleotide specifically to any requirement. Hence, the present invention represents a platform technology for the modification of oligonucleotides, in particular antisense oligonucleotides.

### FIGURES

[0013] FIG. 1 presents examples of oligonucleotide sequences of exemplaric genes TGF-beta1, TGF-beta2, TGF-beta3, PGE-rec., VEGF, IL-10, c-erbb2 (Her-2), c-jun, c-fos, and MIA.

[0014] FIG. 2 shows a general reaction scheme of native ligation, wherein X is a polymer and/or compound, and Y is a modified oligonucleotide comprising a linker. RS⁻ is the leaving group.

[0015] FIG. 3 presents the 5′Cys-Oligo-synthesis. Step 1: synthesis of an oligonucleotide having an amino linker at the 3′-end and a cysteine modifier (OMR) at the 5′-end of the oligonucleotide; step 2: cleaving off of the Fmoc protection group from the cysteine modifier via piperidin, preferably 20%, in DMF; step 3: removing the oligonucleotide from the support and cleaving off of the permanent protection group via ammonia.

[0016] FIG. 4 shows the thioester modification of a polymer and/or compound, which will be coupled to an oligonucleotide via native ligation.

[0017] FIG. 5 presents the conjugation of the 5′-end of cysteine-modified oligonucleotide via native ligation.

[0018] FIG. 6 shows the protection and activation, respectively of the thiol-function of the cysteine residue (Native Ligation Site) for example via dipyridyldisulfide wherein R is a polymer and/or compound.

[0019] FIG. 7 demonstrates the conjugation of the 3′-end of a 5′-end conjugated oligonucleotide for example via NHS(N-hydroxysuccimid) linker, wherein R′ and R″ is a polymer and/or a compound.

[0020] FIG. 8 presents an example of 3′-cysteine oligonucleotide synthesis using for example a cysteine modified solid support.

[0021] FIG. 9 demonstrates increasing stability of a modified oligonucleotide against S1 endonuclease in comparison to an unmodified oligonucleotide, wherein FIG. 9a refers to the unmodified oligonucleotide, FIG. 9b to the mPEG400-Oligo-mPEG1000 (mPEG400 at the 5′-end of the oligonucleotide and mPEG1000 at the 3′-end of the oligonucleotide), and FIG. 9c to the mPEG1000-Oligo-mPEG400 (mPEG1000 at the 5′-end of the oligonucleotide and mPEG400 at the 3′-end of the oligonucleotide). Samples were taken at 0 h, 1 h, 24 h, 48 h, 72 h, and 144 h of incubation with S1 endonuclease.

[0022] FIG. 10 presents the increased stability of a modified oligonucleotide against 5′-exonuclease in comparison to an unmodified oligonucleotide, wherein FIG. 10a refers to the unmodified oligonucleotide, FIG. 10b to the mPEG400-Oligo-mPEG1000 (mPEG400 at the 5′-end of the oligonucleotide and mPEG1000 at the 3′-end of the oligonucleotide), and FIG. 10c to the mPEG1000-Oligo-mPEG400 (mPEG1000 at the 5′-end of the oligonucleotide and mPEG400 at the 3′-end of the oligonucleotide). Samples were taken at 0 h, 1 h, 24 h, 48 h, 72 h, and 144 h of incubation with 5′-exonuclease.

[0023] FIG. 11 shows the increased stability of a modified oligonucleotide against 3′-exonuclease in comparison to an unmodified oligonucleotide, wherein FIG. 11a refers to the unmodified oligonucleotide, FIG. 11b to the mPEG400-Oligo-mPEG1000 (mPEG400 at the 5′-end of the oligonucleotide and mPEG1000 at the 3′-end of the oligonucleotide), and FIG. 11c to the mPEG1000-Oligo-mPEG400 (mPEG1000 at the 5′-end of the oligonucleotide and mPEG400 at the 3′-end of the oligonucleotide). Samples were taken at 0 h, 1 h, 24 h, 48 h, 72 h, and 144 h of incubation with 3′-exonuclease.

[0024] FIG. 12 presents the schematic coupling of a 5′-/3′-end PEG modified oligonucleotide, which was modified at the 5′-end via native ligation according to the present invention, and a peptide at the oligonucleotide's native ligation site. The activated thiol residue of the oligonucleotide reacts with the free thiol residue at the C-terminus of the peptide by forming a disulfide bond and elimination of a pyridinthion.

[0025] FIG. 13 shows the results of the reaction of the 3′-end PEG modified oligonucleotide of SEQ ID No. 2461 and penetratin based on the principle presented in FIG. 12 (see Example 14). In FIG. 13A samples of the products were loaded on a 19% PAGE gel, which is silver stained: M is a marker comprising the antisense oligonucleotide (ASO)-2 nucleotides, ASO-1 nucleotide, i.e., the antisense oligonucleotide minus 1 or 2 nucleic acids, ASO, mPEG400-ASO-mPEG400, mPEG1000-ASO-mPEG1000, lane 1 shows the 3′-end PEG modified oligonucleotide without penetratin, lane 2 shows the 3′-end PEG modified oligonucleotide with 0.5× excess of penetratin, lane 3 shows the 3′-end PEG modified oligonucleotide with 1× excess of penetratin, lane 4 shows the 3′-end PEG modified oligonucleotide with 2× excess of penetratin, lane 5 shows the 3′-end PEG modified oligonucleotide with 4× excess of penetratin, lane 6 shows the 3′-end PEG modified oligonucleotide with 8× excess of penetratin, and lane 7 shows the 3′-end PEG modified oligonucleotide with 16× excess of penetratin; depending on the excess of penetratin the amount of PEG-modified oligonucleotide connected to penetratin increases. FIG. 13B shows a chromatogram of the 3′-end PEG modified oligonucleotide without penetratin (A) according to lane 1), and with 2× (B) according to lane 4) and 8× (C) according to lane 6) excess of penetratin, which is connected to the native ligation site, according to FIG. 13A. FIG. 13C shows the curves of the chromatogram in more detail, wherein line A presents the 3′-end PEG modified oligonucleotide, line B presents the 3′-end PEG modified oligonucleotide, wherein penetratin is connected to the modified oligonucleotide when a 2× excess of penetratin was added to the modified oligonucleotide, and line C presents the 3′-end PEG modified oligonucleotide, wherein penetratin is connected to the modified oligonucleotide when an 8× excess of penetratin was added to the modified oligonucleotide.

[0026] FIG. 14 shows the results of the reaction of the 5′-/3′-end PEG modified oligonucleotide of SEQ ID No. 2030 and penetratin based on the principle presented in FIG. 12 (see Example 14). In FIG. 14A samples of the products were loaded on a 19% PAGE gel, which is silver stained: M is a marker comprising the antisense oligonucleotide (ASO)-2 nucleotides, ASO-1 nucleotide, ASO, mPEG400-ASO-mPEG400, mPEG1000-ASO-mPEG1000, lane 1 shows the 5′-/3′-end PEG modified oligonucleotide without penetratin, lane 2 shows the 5′-/3′-end PEG modified oligonucleotide with 0.5× excess of penetratin, lane 3 shows the 5′-/3′-end PEG modified oligonucleotide with 1× excess of penetratin, lane 4 shows the 5′-/3′-end PEG modified oligonucleotide with 2× excess of penetratin, lane 5 shows the 5′-/3′-end PEG modified oligonucleotide with 4× excess of penetratin, and lane 6 shows the 5′-/3′-end PEG modified oligonucleotide with 8× excess of penetratin; depending on the excess of penetratin the amount of PEG-modified oligonucleotide connected to penetratin increases. FIG. 14B shows a chromatogram of the 5′-/3′-end PEG modified oligonucleotide without penetratin (A) according to lane 1), and with 0.5× (B) according to lane 2), 2× (C) according to lane 4), and 8× (D) according to lane 6) excess of penetratin, which is connected to the native ligation site, according to FIG. 14A. FIG. 14C shows the curves of the chromatogram in more detail, wherein line A presents the 5′-/3′-end PEG modified oligonucleotide, line B presents the 5′-/3′-end PEG modified oligonucleotide, wherein penetratin is connected to the modified oligonucleotide when a 0.5× excess of penetratin was added to the modified oligonucleotide, line C presents the 5′-/3′-end PEG modified oligonucleotide, wherein penetratin is connected to the modified oligonucleotide when an 2× excess of penetratin was added to the modified oligonucleotide, and line D presents the 5′-/3′-end PEG modified oligonucleotide, wherein penetratin is connected to the modified oligonucleotide when an 8× excess of penetratin was added to the modified oligonucleotide.

[0027] FIG. 15 presents the results of experiments, where 5′-/3′-end PEG modified oligonucleotide of SEQ ID No. 2030 without an accessible native ligation site. Thus, even if penetratin is added to the oligonucleotide, no connection is detectable based on the principle presented in FIG. 12 (see Example 14), where the native ligation site is blocked. The samples of the products were loaded on a 19% PAGE gel, which is silver stained: M is a marker comprising the antisense oligonucleotide (ASO)-2 nucleotides, ASO-1 nucleotide, ASO mPEG400-ASO-mPEG400, mPEG1000-ASO-mPEG100, lane 1 shows the 5′-/3′-end PEG modified oligonucleotide without penetratin, lane 2 shows the 5′-/3′-end PEG modified oligonucleotide with 0.5× excess of penetratin, lane 3 shows the 5′-/3′-end PEG modified oligonucleotide with 1× excess of penetratin, lane 4 shows the 5′-/3′-end PEG modified oligonucleotide with 2× excess of penetratin, and lane 5 shows the 5′-/3′-end PEG modified oligonucleotide with 4× excess of penetratin. When the native ligation site is blocked no connection with penetratin is observable independent of the penetratin excess.

[0028] FIG. 16 presents the results of the reaction of the 5′-/3′-end PEG modified oligonucleotide and the RGDC peptide based on the principle presented in FIG. 12 (see Example 15). In FIG. 16A samples of the products were loaded on a 19% PAGE gel, which is silver stained: M is a marker comprising the antisense oligonucleotide (ASO)-2 nucleotides, ASO-1 nucleotide, ASO, mPEG400-ASO-mPEG400, mPEG1000-ASO-mPEG100, lane 1 shows the 5′-/3′-end PEG modified oligonucleotide, lane 2 shows the reaction product of RGDC peptide in a 0.5× excess connected to the native ligation site of the 5′-/3′-end PEG modified oligonucleotide, lane 3 shows the reaction product of RGDC peptide in a 2× excess connected to the native ligation site of the 5′-/3′-end PEG modified oligonucleotide, lane 4 in a 8× excess and lane 5 in a 16× excess. FIG. 16B shows a chromatogram of the 5′-/3′-end PEG modified oligonucleotide without RGDC (A) according to lane 1) and with 2× (B) according to lane 3) and 8× (C) according to lane 4) excess of RGDC which is connected to the native ligation site according to FIG. 16A. FIG. 16C shows the curves of the chromatogram in more detail, wherein line A presents the 5′-/3′-end PEG modified oligonucleotide, line B presents the 5′-/3′-end PEG modified oligonucleotide, wherein RGDC is connected to the modified oligonucleotide when a 2× excess of RGDC was added to the modified oligonucleotide, and line C presents the 5′-/3′-end PEG modified oligonucleotide, wherein RGDC is connected to the modified oligonucleotide when an 8× excess of RGDC was added to the modified oligonucleotide.

[0029] FIG. 17 presents the effect of 5′-/3′-end PEG-modified AP12009 on glioma cells (see Example 16), wherein AP12009 is modified via native ligation at the 5′-end end (derivative #26) in comparison to the effect of 5′-/3′-end PEG- and RGDC-modified AP12009, wherein AP12009 is modified via native ligation at the 5′-end end and RGDC is connected to the native ligation site (derivative #28) according to FIG. 14. FIG. 17A shows the effect on the proliferation of glioma cells and FIG. 17B on the expression of TGF-132, i.e., the inhibitory effect of AP12009 and its via native ligation modified forms. Black columns indicate AP12009, light grey columns indicate mPEG400-AP12009-mPEG1000 (derivative #26) and dark grey columns indicate 5′-/3′-end PEG modified AP 12009 connected to RGDC at the native ligation site, i.e., mPEG400-(RGDC-S)-Cys-AP12009-mPEG1000 (derivative #28). Derivative #28 is the most efficient form in suppressing TGF-beta2 expression in glioma cells compared to unmodified AP12009 and derivative #26. The concentrations of AP12009, derivative #26, and #28 used in this experiment were 0 μM, 0.25 μM, 0.5 μM, 1 μM, 2.5 μM, 5 μM, or 10 μM.

[0030] FIG. 18 shows the results of the reaction of the cystein comprising 5′-/3′-end PEG modified oligonucleotide and Iodoacetamide-Fluorescin as an example for an irreversible binding. In FIG. 15 the educt and the product were loaded on a 19% PAGE gel, which is silver stained: M is a marker comprising the antisense oligonucleotide (ASO)-2 nucleotides, ASO-1 nucleotide, ASO, mPEG400-ASO-mPEG400, mPEG1000-ASO-mPEG100, lane 1 shows the 5′-/3′-end PEG modified oligonucleotide without Fluorescein (educt), and lane 2 shows the 5′-/3′-end PEG modified oligonucleotide with Fluorescin connected to the native ligation site of the modified oligonucleotide.

### DETAILED DESCRIPTION

[0031] The present invention is directed to a method providing a platform for a broad range of oligonucleotide conjugates based on highly specific modifications of the 5′-end of the oligonucleotide via native ligation. Preferably the 5′-end of the oligonucleotide is modified by binding of a polymer and/or a compound via native ligation, wherein the thiol function of the cysteine residue is called native ligation site. The cysteine residue remaining after native ligation is optionally modified by binding of a polymer and/or a compound. The 3′-end of the oligonucleotide is likewise optionally modified by binding of a polymer and/or a compound, wherein the 3′-end of the oligonucleotide is modified in a first step, in a second step after modification of the 5′-end of the oligonucleotide, or in a third step after modification of the 5′-end and the native ligation site of the oligonucleotide and conjugate, respectively. The native ligation site, which is preferably a cysteine residue of the polymer- and/or compound-oligonucleotide conjugate, is modified by binding of a further polymer and/or compound before or after modification of the 3′-end of the oligonucleotide.

[0032] Alternatively, the 3′-end of the oligonucleotide is modified with a polymer and/or compound via native ligation, and optionally, in addition, the 5′-end of the oligonucleotide, and/or the cysteine residue of the native ligation site is modified by binding to a polymer and/or a compound.

[0033] In some embodiments, the order of modifying the different positions of the oligonucleotide does not influence the characteristics of the oligonucleotide conjugate. In other embodiments, the order of the steps for modifying the oligonucleotide is essential to reach a specific oligonucleotide conjugate. Preferably, the 5′- or 3′-end of the oligonucleotide is modified via native ligation in a first step before modification of the free 3′- or 5′-end, or before modification of the native ligation site.

[0034] In another embodiment, both ends, i.e., the 5′- and the 3′-end of the oligonucleotide are modified via native ligation either one end after the other end, or both ends in parallel. If one end of the oligonucleotide is modified after the other via native ligation, the second end has to be protected when the first end is modified via native ligation. Preferred protecting groups are orthogonal protection groups.

[0035] In a further embodiment, the 5′-end and/or the 3′-end of the oligonucleotide and/or the native ligation site, in particular the cysteine residue, or any other residue of the oligonucleotide is modified by binding of a linker before binding of a polymer and/or a compound. The linker provides a high variety of different chemical bindings and allows reversible or irreversible binding of the polymer and/or the compound at each position of the oligonucleotide, preferably at the 5′-, 3′-end and/or native ligation site of the oligonucleotide.

[0036] Alternatively, a solid support is bound to the modified oligonucleotide, preferably at the 5′-end, the 3′-end and/or the native ligation site of the oligonucleotide. The binding of a solid support and the modified oligonucleotide forms for example the basis for a kit or purification system resulting for example in a highly purified modified oligonucleotide, which is not achievable with any other method.

[0037] A solid support is an insoluble, inert, functionalized, preferably polymeric material to which an oligonucleotide or a oligonucleotide conjugate is attached, optionally via a linker, for example allowing the oligonucleotide or the oligonucleotide conjugate to be readily separated (by filtration, centrifugation, etc.) from excess reagents, soluble reaction byproducts, or solvents.

[0038] An example of a solid support is a magnetic bead, or a support used for oligonucleotide synthesis such as controlled pore glass, or thiol-activated sepharose for isolating and separating, respectively, of thiol containing conjugates (e.g. thiol-activated sepharose).

[0039] The present method allows the construction of an unlimited number of modifications for example all these different modifications explicitly disclosed in the specification, and thus, provides an advantageous platform for tailoring an oligonucleotide for specific requirements such as the combination of drug targeting, e.g., via an antibody, and the increase of the half-life of the oligonucleotide for example via a polymer such as a polyalkylene oxide, optionally in high purity. The method leads to the production of highly specifically modified oligonucleotides, preferably without the use of protection groups, tailored for any desired application and function, respectively.

[0040] The method of the present invention is advantageously not limited by the type or size and molecular weight, respectively, of the polymer and/or compound described.

[0041] The at least one polymer, for example starch, is either linear or branched, wherein the polymer comprises one or more, e.g., 2, 3, 4, 5, 6, 7, 8, 9, or 10 branching points. The term “branched” further comprises polymers such polyalkylene oxide, in particular PEG, which are combined via a linker, e.g., a Lys core to form a “pseudo-branched” polymer. In this case the polymer represents a monomer of a multi-polymer complex.

[0042] A polymer according to the present invention is any class of natural and/or synthetic substances composed of monomers and/or macromolecules that are multiples of monomers wherein the polymer optionally comprises natural and/or synthetic monomers. The monomers need not all be the same or have the same structure forming a homo- or copolymer. Polymers consist of long chains of unbranched or branched monomers, and/or are cross-linked networks of monomers in two or three dimensions. Their backbones are flexible or rigid. Many important natural materials are for example organic polymers, including polysaccharides, polypeptides, proteins, lignin, rubber, or nucleic acid. Polymers preferably increase the size and molecular weight of the oligonucleotide in the present invention and/or guide the oligonucleotide to the target. Polymers in the context of this application comprise biocompatible materials, such as polyalkylen oxides, more preferred polyethyleneglycol, for example alpha-, omega-dihydroxylpolyethyleneglycol, biodegradable lactone-based polymers, e.g. polyacrylic acid, polylactide acid (PLA), poly(glycolic acid) (PGA), polypropylene, polystyrene, polyolefin, polyamide, polycyanoacrylate, polyimide, polyethylenterephthalat (PET, PETG), polyethylene terephthalate (PETE), polytetramethylene glycol (PTG), or polyurethane as well as mixtures thereof. Mixture refers to the use of different polymers within the same compound as well as it refers to block copolymers. Block copolymers are polymers wherein at least one section of a polymer is build up from monomers of another polymer. Preferred polymers of the present invention are polyalkylene oxides such as PEG as well as polyethylene imide (PEI), or hydroxy ethyl starch (HES), wherein HES is preferably bound to the cysteine residue of the native ligation site via the thiol function. Selection of such materials depends on a number of factors including the stability and toxicity of the polymer.

[0043] A compound of the present invention is any substance having functional characteristics such as a small molecule, an antibody for example MUJ591, an antibody binding to glycoprotein IIb/IIa, to CD52, to CD25, to VEGF, to the epidermal growth factor, to CD33, to CD20, or to carbonic anhydrase, an antigen for example an external domain of prostate-specific membrane antigen (PSMA), an enzyme, a part of an antibody, or an enzyme, any peptide, e.g., an internalizing peptide, a cell penetrating peptide such as penetratin (see Example 14), TAT (transactivator or transcription), Transportan (e.g., TP10), R9 peptide, MPG peptide, KALA peptide, a pH (low) insertion peptide, hormonal peptides such as LHRH, bombesin, somatostatin, or a targeting peptide such as RGD (Arg-Gly-Asp), in particular linear or cyclic RGD (see Example 15), an aptamer (based on nucleic acid, protein, or peptide), a spiegelmer, siRNA, e.g., cholesterol-modified siRNA, RNAi, shRNA, microRNA (miRNA), a human serum albumin carrier, a tumor vaccine such as a tumor antigen e.g., PSA, PAP, HIFalpha or an immune stimulatory agent, a cytotoxine such as TMZ, BCNU, DTIC, 5-Fluorouracil (FU), gemcitabine, taxol (pacitaxel), irinoteca, oxaliplatin doxorubicin, cyclophosphamid, folinsaure, a chromophor, a marker for example a fluorescent marker such as FITC, fluorescin (see Example 17), rhodamine, phycoerytherin, phycocynin, allophycocyanin, o-phthaldehyde or fluorescamine, biotin, a contrast agent, a chemiluminescent agent such as luminol, isoluminol, aromatic acridinium ester, imidazole, acridinium salt, or oxalate ester, a bioluminscent agent such as luciferin, luciferase or aequorin, a hormone, a signal peptide, a lipid, a fatty acid, e.g., conjugated linoleic acid, a sugar, an amino acid, a receptor, a part of a receptor, or any ligand of a receptor for example an antagonist of the CXCR4 chemokine receptor or binding molecule, or glutathione which enhances the delivery of the conjugate via the glutathione transferes for example across the blood-brain-barrier.

[0044] An RGD (Arg-Gly-Asp) peptide for example is linear or cyclic and consists of RGD or comprises RGD for example Arg-Gly-Asp-D-Phe-Cys, Arg-Gly-Asp-D-Phe-Glu, Arg-Gly-Asp-D-Phe-Lys, H-Gly-Arg-Gly-Asp-Asn-Pro-OH, or H-Gly-Gly-Gly-Gly-Arg-Gly-Asp-Ser-Pro-OH.

[0045] A compound of the present invention is preferably directed to the targeting and/or detecting of the oligonucleotide. Advantageously, the compounds, in particular markers and chromophors, are solidly bound to the oligonucleotide, preferably via native ligation or to the native ligation site, which reduces amongst others the risk of false positive results due to unbound markers, chromophors etc.

[0046] In a preferred embodiment, a polymer and/or compound, which is connected to the oligonucleotide via the native ligation site comprises an additional sterically available cysteine residue for example at the end or within the polymer and/or compound like the N-terminus, the C-terminus or within the polymer or compound such as a peptide, preferably for potential further bindings of polymers and/or compounds.

[0047] A conjugate of the present invention is an oligonucleotide, preferably an antisense oligonucleotide comprising a polymer and/or a compound at the 5′-end and/or the 3′-end of the oligonucleotide and/or at the native ligation site(s), wherein the 5′-end (FIG. 5) or the 3′-end (FIG. 8) of the oligonucleotide is or both ends are modified via native ligation.

[0048] Modification of an oligonucleotide means the binding of a polymer and/or a compound to the oligonucleotide, preferably to the 5′-end and/or the 3′-end of the oligonucleotide and/or the native ligation site, wherein the polymer and/or compound is bound to the 5′- and/or 3′-end of the oligonucleotide via native ligation or to one of the 5′- or 3′-ends with or without a linker.

[0049] The free end of an oligonucleotide or of an oligonucleotide conjugate is the 5′-end and 3′-end, respectively, of the oligonucleotide, which is optionally bound to a linker, and is free of a polymer and/or a compound. The free end of the oligonucleotide or the oligonucleotide conjugate is suitable to be bound to a polymer and/or a compound with or without a linker.

[0050] The direct binding of at least one polymer and/or at least one compound to an oligonucleotide results in a conjugate, i.e., a polymer-oligonucleotide, a compound-oligonucleotide, or a mixed compound-polymer-oligonucleotide conjugate. Further polymers and/or compounds are optionally bound to the oligonucleotide and conjugate, respectively, either directly at any position of the oligonucleotide for example at a phosphate group, a sugar moiety, and/or a base of the oligonucleotide, preferably at the 5′-, 3′-end and/or native ligation site of the oligonucleotide, or indirectly via a polymer or compound already bound to the oligonucleotide and conjugate, respectively. If only the 5′-end of the oligonucleotide is modified with a polymer or a compound via native ligation, the polymer or the compound is preferably not a peptide or a protein.

[0051] In a further embodiment one or more polymers and/or compounds are bound to the oligonucleotide and/or to a polymer and/or compound already bound to the oligonucleotide with or without a linker. The term “linker” comprises any type of linker, preferably cross-linker, which refer to any chemical substance able to bind at least two molecules such as an oligonucleotide and at least one polymer and/or compound. Linkers include zero length linkers, homobifunctional crosslinkers, heterobifunctional cross linkers and the like. Different linkers are usable and combinable, respectively, in a conjugate of the invention. In addition, a linker connects two or more oligonucleotides, which are modified or will be modified. Depending on the linker, the binding of the polymer and/or compound to the oligonucleotide is reversible for example via disulfide binding, or irreversible for example via thioether binding.

[0052] An example for a linker, which connects a polymer and/or a compound, preferably a peptide, to a native ligation site is a Peptide Modifying Reagent (PMR) such as pentafluorophenyl S-benzyl-thiosuccinate (e.g., OPeC® Conjugation Reagents of link technologies).

[0053] Further linkers of the invention are for example homobifunctional linkers such as Lomant's reagent dithiobis (succinimidylpropionate) DSP, 3′3′-dithiobis(sulfosuccinimidyl proprionate (DTSSP), disuccinimidyl suberate (DSS), bis(sulfosuccinimidyl)suberate (BS), disuccinimidyl tartrate (DST), disulfosuccinimidyl tartrate (sulfo DST), ethylene glycobis(succinimidylsuccinate) (EGS), disuccinimidyl glutarate (DSG), N,N′-disuccinimidyl carbonate (DSC), dimethyl adipimidate (DMA), dimethyl pimelimidate (DMP), dimethyl suberimidate (DMS), dimethyl-3,3′-dithiobispropionimidate (DTBP), 1,4-di-3′-(2′-pyridyldithio)propionamido)butane (DPDPB), bismaleimidohexane (BMH), aryl halide-containing compound (DFDNB), such as e.g. 1,5-difluoro-2,4-dinitrobenzene or 1,3-difluoro-4,6-dinitrobenzene, 4,4′-difluoro-3,3′-dinitrophenylsulfone (DFDNPS), bis-[β-(4-azidosalicylamido)ethyl]disulfide (BASED), formaldehyde, glutaraldehyde, 1,4-butanediol diglycidyl ether, adipic acid dihydrazide, carbohydrazide, o-toluidine, 3,3′-dimethylbenzidine, benzidine, α,α′-p-diaminodiphenyl, diiodo-p-xylene sulfonic acid, N,N′-ethylene-bis(iodoacetamide), N,N′-hexamethylene-bis(iodoacetamide).

[0054] The linkage with heterobifunctional linkers is preferred, which increases specificity of the reaction. Examples for heterobifunctional linkers are amine-reactive and sulfhydryl cross-linkers such as N-succinimidyl 3-(2-pyridyldithio)propionate (sPDP), long-chain N-succinimidyl 3-(2-pyridyldithio)propionate (LC-sPDP), water-soluble-long-chain N-succinimidyl 3-(2-pyridyldithio) propionate (sulfo-LC-sPDP), succinimidyloxycarbonyl-α-methyl-α-(2-pyridyldithio)toluene (sMPT), sulfosuccinimidyl-6-[α-methyl-α-(2-pyridyldithio)toluamido]hexanoate (sulfo-LC-sMPT), succinimidyl-4-(N-maleimidomethyl)cyclohexane-1-carboxylate (sMCC), sulfosuccinimidyl-4-(N-maleimidomethyl)cyclohexane-1-carboxylate (sulfo-sMCC), m-maleimidobenzoyl-N-hydroxysuccinimide ester (MBs), m-maleimidobenzoyl-N-hydroxysulfosuccinimide ester (sulfo-MBs), N-succinimidyl(4-iodoacteyl)aminobenzoate (sIAB), sulfosuccinimidyl(4-iodoacteyl)aminobenzoate (sulfo-sIAB), succinimidyl-4-(ρ-maleimidophenyl)butyrate (sMPB), sulfosuccinimidyl-4-(ρ-maleimidophenyl)butyrate (sulfo-sMPB), N-(γ-maleimidobutyryloxy)succinimide ester (GMBs), N-(γ-maleimidobutyryloxy)sulfosuccinimide ester (sulfo-GMBs), succinimidyl 6-((iodoacetyl)amino)hexanoate (sIAX), succinimidyl 646-(((iodoacetyl)amino)hexanoyl)amino)hexanoate (sIAXX), succinimidyl 4-(((iodoacetyl)amino)methyl)cyclohexane-1-carboxylate (sIAC), succinimidyl 6-((((4-iodoacetyl)amino)methyl)cyclohexane-1-carbonyl)amino) hexanoate (sIACX), p-nitrophenyl iodoacetate (NPIA), carbonyl-reactive and sulfhydryl-reactive cross-linkers such as 4-(4-N-maleimidophenyl)butyric acid hydrazide (MPBH), 4-(N-maleimidomethyl)cyclohexane-1-carboxyl-hydrazide-8 (M₂C₂H), 3-(2-pyridyldithio)propionyl hydrazide (PDPH), amine-reactive and photoreactive cross-linkers such as N-hydroxysuccinimidyl-4-azidosalicylic acid (NHs-AsA), N-hydroxysulfosuccinimidyl-4-azidosalicylic acid (sulfo-NHs-AsA), sulfosuccinimidyl-(4-azidosalicylamido)hexanoate (sulfo-NHs-LC-AsA), sulfosuccinimidyl-2-(ρ-azidosalicylamido)ethyl-1,3′-dithiopropionate (sAsD), N-hydroxysuccinimidyl-4-azidobenzoate (HsAB), N-hydroxysulfosuccinimidyl-4-azidobenzoate (sulfo-HsAB), N-succinimidyl-6-(4′-azido-2′-nitrophenylamino)hexanoate (sANPAH), sulfosuccinimidyl-6-(4′-azido-2′-nitrophenylamino)hexanoate (sulfo-sANPAH), N-5-azido-2-nitrobenzoyloxysuccinimide (ANB-NOs), sulfosuccinimidyl-2-(m-azido-o-nitrobenzamido)-ethyl-1,3′-dithiopropionate (sAND), N-succinimidyl-4(4-azidophenyl)1,3′-dithiopropionate (sADP), N-sulfosuccinimidyl(4-azidophenyl)-1,3′-dithiopropionate (sulfo-sADP), sulfosuccinimidyl 4-(ρ-azidophenyl)butyrate (sulfo-sAPB), sulfosuccinimidyl 2-(7-azido-4-methylcoumarin-3-acetamide)ethyl-1,3′-dithiopropionate (sAED), sulfosuccinimidyl 7-azido-4-methylcoumain-3-acetate (sulfo-sAMCA), p-nitrophenyl diazopyruvate (pNPDP), p-nitrophenyl-2-diazo-3,3,3-trifluoropropionate (PNP-DTP), sulfhydryl-reactive and photoreactive cross-linkers such as1-(ρ-Azidosalicylamido)-4-(iodoacetamido)butane (AsIB), N-[4-(ρ-azidosalicylamido)butyl]-3′-(2′-pyridyldithio)propionamide (APDP), benzophenone-4-iodoacetamide, benzophenone-4-maleimide carbonyl-reactive and photoreactive cross-linkers such as ρ-azidobenzoyl hydrazide (ABH), carboxylate-reactive and photoreactive cross-linkers such as 4-(ρ-azidosalicylamido)butylamine (AsBA), and arginine-reactive and photoreactive cross-linkers such as ρ-azidophenyl glyoxal (APG). For more details see Hermanson (1996).

[0055] The oligonucleotide, a polymer and/or a compound, optionally including a linker, are covalently bound to each other, wherein the polymer and/or the compound is preferably bound to the 5′-end and/or 3′-end of the oligonucleotide and/or to the native ligation site. Optionally, the oligonucleotide, the polymer and/or the compound form non-covalent bindings such as intermolecular forces, ionic interactions, e.g., Watson-Crick base pairing, wherein the polymer and/or the compound is likewise preferably bound to the 5′-end and/or 3′-end of the oligonucleotide and/or to the native ligation site.

[0056] The size of an oligonucleotide, which is modified according to the present invention, comprises or consists of at least 5 nucleotides, preferably of between 5 and 70 nucleotides, more preferably of between 10 and 60 nucleotides, even more preferably of between 10 and 40 nucleotides, with higher preference of between 12 and 25 nucleotides, and most preferred of between 12 and 20 nucleotides. In particular the oligonucleotide comprises or consists of 10, 11, 12, 13, 14, 15, 16, 17, 18, 19, 20, 21, 22, 23, 24, or 25 nucleotides. The oligonucleotide is generated in any manner, preferably by chemical synthesis, DNA replication, reverse transcription, or a combination thereof, or isolated from a natural source.

[0057] Preferably, the oligonucleotide in the context of the invention comprises any type of oligonucleotide including an oligonucleotide derivative having e.g., an additional functional group for example an amino group for example at one or both ends of the oligonucleotide. These groups form the basis for example for the reaction with a polymer and/or compound leading to a conjugate such as a PEGylated oligonucleotide.

[0058] Further, oligonucleotides comprise nucleotide building blocks composed of base, sugar, and phosphate moiety. Oligonucleotides include oligonucleotides having non-naturally occurring oligonucleotide building blocks with similar function. Naturally occurring nucleotides as well as non-naturally occurring nucleotides, modifications of these nucleotides at the base, the sugar or the backbone as well as spacers instead of a at least one nucleotide are also referred to as nucleotide building block. Modifications of an oligonucleotide are for example phosphorothioate, methylphosphonate, phosphoramidate, or 2′-modifications of the sugar (e.g., 2′-O-methyl oligonucleotide, 2′-O-methoxy-ethyl oligonucleotide, or 2′-deoxy-2′-fluoro oligonucleotide).

[0059] The oligonucleotide preferably comprises at least 5 nucleotide building blocks, preferably 5 to 120 nucleotide building blocks, more preferably 8 to 30 nucleotide building blocks, even more preferably 10 to 28 nucleotide building blocks, even more preferred 12 to 26 nucleotide building blocks, most preferred 10, 11, 12, 13, 14, 15, 16, 17, 18, 19, 20, 21, 22, 23, 24, 25, or 26 nucleotide building blocks.

[0060] The term nucleotide building block comprises nucleotides composed of naturally-occurring nucleobases, sugars and covalent internucleoside (backbone) linkages, each of these also referred to as portions, as well as oligonucleotides having non-naturally-occurring portions which function similarly, e.g. hybridizing with the same mRNA of a selected target. In one embodiment the base is modified or substituted by a similar molecule. Similar bases are those molecules that are also able to support the hybridization to the mRNA or at least do not affect the hybridization in a negative way. In some embodiments at least one base portion is substituted with a spacer.

[0061] In other embodiments the sugar moiety of the nucleotide building block is modified or substituted by another group, structure, or moiety. Examples for sugars are arabinose, xylose, lyxose, allose, altrose, glucose, mannose, gulose, idose, galactose, talose or stabilized modifications of those sugars. In some embodiments a spacer substitutes the sugar.

[0062] In other embodiments the internucleoside linkage, also referred to a linkage between two nucleotide building blocks, is not a phosphorodiester but another group, structure, or moiety. Such oligonucleotides with at least one modified nucleotide building block are often preferred over native forms because of desirable properties such as enhanced cellular uptake, enhanced affinity for nucleic acid target, increased stability in the presence of nucleases and/or enhanced therapeutic effectiveness.

[0063] Oligonucleotides, having a modified nucleotide building block, further comprise for example peptide nucleic acid (PNA), locked nucleic acid (LNA), and morpholinos as shown in the following:

[chemical structure]

[0064] PNA is chemically similar to DNA and RNA, and is generally artificially synthesized. The PNA's backbone is composed for example of repeating N-(2-aminoethyl)-glycine units linked by peptide bonds. The various purine and pyrimidine bases are preferably linked to the backbone by methylene carbonyl bonds.

[0065] LNA is modified RNA, wherein the ribose moiety of an LNA nucleotide is modified with an extra bridge connecting the 2′ and 4′ carbons. The bridge “locks” the ribose in the 3′-endo structural conformations, which is often found in the A-form of DNA or RNA. LNA is combinable with DNA or RNA bases in an oligonucleotide.

[0066] Morpholino oligonucleotides are an antisense technology used to block access of other molecules to specific sequences with nucleic acid. Morpholinos block small (about 25 base) regions of the base-pairing surface of RNA or DNA.

[0067] In the context of this invention, the term oligonucleotide refers to an oligomer of ribonucleic acid (RNA) or deoxyribonucleic acid (DNA) or mimetics thereof also referred to as nucleotide building block-polymers. The term oligonucleotide comprises single and double stranded RNA or DNA. In case of double stranded RNA or DNA the strands are blunt end or with overhanging ends, wherein one strand has an overhang on one end of the other strand or on both ends of the other strand, or one strand has an overhang on one side and the other strand has an overhang on the opposite side.

[0068] The term oligonucleotide further comprises aptamers and/or spiegelmers. Aptamers are nucleic acid molecules, comprising at least 5 or 8 nucleotides, preferably 10 to 100 nucleotides, more preferably 25 to 75 nucleotides, even more preferably 30 to 70 nucleotides, most preferred between 40 to 60 nucleotides, having specific binding affinity to molecules through interactions other than classic Watson-Crick base pairing. Aptamers are engineered through repeated rounds of in vitro selection or equivalently, SELEX (systemic evolution of ligands by exponential enrichment) to bind to various molecular targets such as small molecules, proteins, nucleic acids, even cells, tissues and organisms, preferably with affinities in the nanomolar to the picomolar range. Aptamers are for example engineered completely in a test tube, are readily produced by chemical synthesis, possess desirable storage properties, and elicit little or no immunogenicity in therapeutic applications. Moreover, aptamers are combinable with ribozymes to self-cleave in the presence of their target molecule.

[0069] Spiegelmers are developed on basis of aptamers. They consist of nucleotides having the L-form leading to a high resistance against nucleases. Hence, spiegelmers have all the diversity characteristics of aptamers as well as their binding characteristics, preferably in the low nanomolar to picomolar range, but possess a structure that prevents enzymatic degradation. Aptamers and spiegelmers bind both to extracellular and intracellular molecules such as a receptor or its ligand, to a transcription factor, or a lipid-containing molecule.

[0070] Furthermore, the term oligonucleotide comprises siRNA, RNAi, shRNA, and microRNA (miRNA). RNAi is a mechanism for RNA-guided regulation of gene expression in which double-stranded ribonucleic acid inhibits preferably the expression of genes with complementary nucleotide sequences. The RNAi pathway is initiated by the enzyme dicer, which cleaves double-stranded RNA to short double-stranded fragments preferably of 15 to 35 base pairs, more preferably of 20 to 30 base pairs, and most preferably 20 to 25 base pairs. One of the two strands of each fragment, which is the “guide strand”, is incorporated into the RNA-induced silencing complex (RISC) and base-pairs with a complementary sequence. The most-well studied effect of RNAi is post-transcriptional gene silencing, which occurs when the guide strand base pairs with a mRNA and induces degradation of the mRNA for example by argonaute, a catalytic component of the RISC complex. The short fragments are known as small interfering or silencing RNA (siRNA), which are preferably perfectly complementary to the gene, which is to be suppressed. In addition to their role in RNAi pathway, siRNA also act in RNAi-related pathways, e.g., as an antiviral mechanism or in shaping the chromatin structure of a genome. Similar to siRNA, microRNA (miRNA), which are single-stranded RNA molecules of 15 to 30 nucleotides, preferably 20 to 30 nucleotides, and most preferably 21 to 23 nucleotides, regulate preferably gene expression. miRNA is encoded by genes that are transcribed from DNA, but not translated into protein (non-coding RNA). Instead the miRNA is processed from primary transcripts known as pre-miRNA preferably to short stem-loop structures such as pre-miRNA and finally to functional miRNA. A further type of RNA preferably involved in gene silencing is short hairpin RNA (shRNA).

[0071] shRNA is RNA which makes a tight hairpin turn that is preferably suitable to silence gene expression via RNAi. shRNA uses a vector introduced into cells and utilizes a promoter, preferably the U6 promoter, to ensure that the shRNA is expressed. The vector is preferably passed on to daughter cells, allowing the gene silencing to be inherited. The cellular machinery preferably cleaves the shRNA hairpin structure, preferably into siRNA, which is then binding to RISC and starts the mechanism as described above.

[0072] Additionally, the term oligonucleotide comprises CpG oligonucleotides. CpG motifs induce preferably Toll-like receptor mediated immune response by simulating bacterial DNA. The CpG oligonucleotide preferably activates immune cells such as dendritic cells and B-lymphocytes, and stimulates NE-κB. CpG oligonucleotides are in general not a target sequence specific approach.

[0073] Moreover, the term oligonucleotide comprises a decoy oligonucleotide, also known as “decoy”, which is preferably a double-strand oligonucleotide bearing a consensus binding sequence for example of a specific transcription factor for manipulating gene expression.

[0074] The oligonucleotide of the present invention preferably hybridizes with mRNA of a molecule negatively influencing a physiological and/or biochemical effect in a cell or hybridizes with mRNA of the receptor of the molecule. In a preferred embodiment, the modified oligonucleotide of the present invention hybridizes with mRNA of TGE-beta1, TGF-beta2, TGF-beta3, VEGF, IL-10, c-jun, c-fos, Her-2, MIA, receptors thereof, and/or prostaglandin E2 receptor, or binds to and interacts with, respectively, a target in form of an aptamer or a spiegelmer. Further preferred embodiments of oligonucleotides are given in the sequence listing, or are oligonucleotides published in WO 94/25588, WO 95/17507, WO 95/02051, WO 98/33904, WO 99/63975, WO 01/68146, WO 01/68122, WO 03/06445, WO 2005/014812, WO 2005/059133, WO 2005/084712 herein incorporated by reference.

[0075] Preferred oligonucleotides that are linked with at least one polymer and/or at least one compound according to the present invention comprise or consist of at least one of SEQ ID NO 1 to 435 (cf. FIG. 1), or of example 10.

[0076] Especially preferred oligonucleotides consist of or comprise SEQ ID NO. 2030, 2031, 2032, 2057 and/or 2066. Mostly preferred are the oligonucleotides comprising or consisting of SEQ ID No.: 2030 (CGGCATGTCTATTTTGTA) and/or SEQ ID No.: 2057 (CTGATGTGTTGAAGAACA).

[0077] In a preferred embodiment, the modified oligonucleotide of the present invention is a novel, improved therapeutic agent for controlling, treating and/or preventing one or more of cellular proliferative and/or differentiating diseases or disorders, diseases or disorders associated with bone metabolism, immune, hematopoietic, cardiovascular, liver, kidney, muscular, hematological, viral, pain, neurological and/or metabolic diseases or disorders, in particular disorders or diseases associated with undesired TGF-beta signaling. The term cancer, carcinoma, or neoplasm includes malignancies of the various organ systems for example such affecting brain, eye, lung, breast, thyroid, lymphoid, gastrointestinal, and genito-urinary tract.

[0078] The diseases or disorders, in particular maligne or benign tumors or metastases and their formation, which are controllable, preventable and/or treatable with a modified oligonucleotide of the present invention, or a pharmaceutical composition comprising or consisting of such modified oligonucleotide include, but are not limited to solid tumors, blood born tumors such as leukemias, acute or chronic myelotic or lymphoblastic leukemia, tumor metastasis, benign tumors, for example hemangiomas, acoustic neuromas, neurofibromas, trachomas, pyogenic granulomas, pre-malignant tumors, rheumatoid arthritis, psoriasis, astrocytoma, acoustic neuroma, blastoma, craniopharyngloma, ependymoma, Ewing's tumor, medulloblastoma, glioma, hemanglioblastoma, Hodgkins-lymphoma, medullablastoma, leukaemia, mesothelioma, neuroblastoma, neurofibroma, non-Hodgkins lymphoma, pinealoma, retinoblastoma, sarcoma (including angiosarcoma, chondrosarcoma, endothelialsarcoma, fibrosarcoma, leiomyosarcoma, liposarcoma, lymphangioandotheliosarcoma, lyphangiosarcoma, melanoma, meningioma, myosarcoma, oligodendroglioma, osteogenic sarcoma, osteosarcoma), seminoma, trachomas, Wilm's tumor, or is selected from the group of bile duct carcinoma, bladder carcinoma, brain tumor, breast cancer, bronchogenic carcinoma, carcinoma of the kidney, cervical cancer, choriocarcinoma, cystadenocarcinome, embryonal carcinoma, epithelial carcinoma, esophageal cancer, cervical carcinoma, colon carcinoma, colorectal carcinoma, endometrial cancer, gallbladder cancer, gastric cancer, head cancer, liver carcinoma, lung carcinoma, medullary carcinoma, neck cancer, non-small-cell bronchogenic/lung carcinoma, ovarian cancer, pancreas carcinoma, papillary carcinoma, papillary adenocarcinoma, prostate cancer, small intestine carcinoma, prostate carcinoma, rectal cancer, renal cell carcinoma, skin cancer, small-cell bronchogenic/lung carcinoma, squamous cell carcinoma, sebaceous gland carcinoma, testicular carcinoma, uterine cancer, liver metastasis, lung metastasis, brain metastasis, metastasis of lymphoma.

[0079] The modified oligonucleotides of the invention as well as the pharmaceutical compositions comprising or consisting of one or more such modified oligonucleotides are also suitable to control, prevent and/or treat a variety of immune disorders such as autoimmune diseases or disorders, e.g., diabetes mellitus, arthritis, including rheumatoid arthritis, juvenile rheumatoid arthritis, osteoarthritis, psoriacathritis; multiple sclerosis, encephalomyelitis, myasthenia gravis, systemic lupus erythrematosis, autoimmunethyroiditis, dermatitis, including atopis dermatitis, eczematous dermatitis; psoriasis, Sjogren's Syndrome, Crohn's disease, aphthous ulcer, irits, conjunctivitis, keratoconjunctivitis, ulcerative colitis, asthma, allergic asthma, cutaneous lupus erythematosus, scleroderma, vaginitis, proctitis, drug eruptions, leprosy reversal reactions, erythema nodosum leprosum, autoimmune uveitis, allergic encephalomyelitis, acute necrotizing hemorrhagic encephalopathy, idiopathic bilateral progressive sensorineural hearing loss, aplastic anemia, pure red cell anemia, idiopathic thrombocytopenia, polychondritis, Wegener's granulomatosis, chronic active hepatitis, Stevens-Johnson syndrome, idiopathic sprue, lichen planus, Graves' disease, sarcoidosis, primary billiary cirrhosis, uveitis posterior, and interstitial lung fibrosis, graft-versus-host disease, cases of transplantation, and allergy such as an atopic allergy. Moreover, the modified oligonucleotide or the pharmaceutical composition is suitable to control, prevent and/or treat cardiovascular diseases or disorders such as hypertension, atherosclerosis, coronary artery spasm, congestive heart failure, coronary artery disease, valvular disease, arrhythmias, and cardiomyopathies; or viral diseases or disorders for example hepatitis A (HVA), hepatitis B (HVB), hepatitis C (HVC), or caused by herpes simplex virus (HSV), HIV, FIV, poliovirus, influenza virus, adenoviruses, papillomaviruses, Epstein-Barr-viruses and small pox virus, or virus-associated cancer such as hepatocellular cancer.

[0080] The modified oligonucleotides of the invention as well as the pharmaceutical compositions comprising or consisting of one or more such oligonucleotides are further suitable to control, prevent and/or treat fibrotic diseases or disorders which are for example associated with undesired TGF-beta signaling, which include, without limitation, kidney disorders and (excessive) fibrosis and/or sclerosis, such as glomerulonephritis (GN) of all etiologies, e.g., mesangial proliferative GN, immune GN, crescentic GN; diabetic nephropathy, renal interstitial fibrosis and all causes of renal interstitial fibrosis including hypertension, renal fibrosis resulting from complications of drug exposure, including cyclosporin treatment of transplant recipients, HIV-associated nephropathy, or transplant nephropathy; hepatic diseases associated with (excessive) scarring and (progressive) sclerosis for example cirrhosis due to all etiologies, disorders of the biliary tree, and hepatic dysfunction; pulmonary fibrosis with consequential loss of gas exchange or ability to efficiently move air into and out of the lungs such as adult respiratory distress syndrome (ARDS), chronic obstructive pulmonary disease (COPD), idiopathic pulmonary fibrosis (IPF), acute lung injury (ALI) or pulmonary fibrosis due to infectious or toxic agents such as smoke, chemicals, allergens, or autoimmune diseases; eye diseases or disorders associated with fibroproliferative states such as fibroproliferative vitreoretinopathy of any etiology or fibrosis associated with ocular surgery, e.g., treatment of glaucoma, retinal reattachment, cataract extraction, or drainage procedures of any kind; excessive or hypertrophic scar formation in the dermis occurring for example during wound healing resulting from trauma or surgical wounds. The modified oligonucleotides, and compositions of the invention, respectively, are particularly designed to target genes associated with particular diseases or disorders, preferably TGF-β such as TGF-β1, -β2, or -β3.

[0081] The oligonucleotide conjugate of this invention is administrable by different routes, which include, but are not limited to electroporation, epidermal, impression into skin, intra-arterial, intra-articular, intra-cranial, intra-thecal, intra-cerebral, intra-dermal, intra-lesional, intra-muscular, intra-nasal, intra-ocular, intra-peritoneal, intra-prostatic, intra-pulmonary, intra-spinal, intra-tracheal, intra-tumoral, intra-venous, intra-vesical placement within cavities of the body, nasal inhalation, oral, pulmonary inhalation (e.g., by inhalation or insufflation of powders or aerosols, including by nebulizer), subcutaneous, subdermal, transdermal, or topical (including ophthalmic and to mucous membranes including vaginal and rectal delivery). Topical administration further comprises administration of the skin, the eyes and the ears.

[0082] In one embodiment, a cytokine and/or a chemotherapeutic is co-administered with one or more oligonucleotide conjugates of the invention. The cytokine and/or the chemotherapeutic increases the effect of the oligonucleotide and/or of one or more compounds bound to the oligonucleotide for example a small molecule, an antibody for example MUJ591, an antibody binding to glycoprotein IIb/IIa, to CD52, to CD25, to VEGF, to the epidermal growth factor, to CD33, to CD20, or to carbonic anhydrase, an antigen for example an external domain of prostate-specific membrane antigen (PSMA), an enzyme, a part of an antibody, or an enzyme, any peptide, e.g., an internalizing peptide, a cell penetrating peptide such as penetratin, TAT (transactivator or transcription), Transportan (e.g., TP10), R9 peptide, MPG peptide, KALA peptide, a pH (low) insertion peptide, hormonal peptides such as LHRH, bombesin, somatostatin, or a targeting peptide such as RGD (Arg-Gly-Asp), an aptamer (based on nucleic acid, protein, or peptide), a spiegelmer, siRNA, e.g., cholesterol-modified siRNA, RNAi, shRNA, microRNA (miRNA), a human serum albumin carrier, a tumor vaccine such as a tumor antigen e.g., PSA, PAP, HIFalpha or an immune stimulatory agent, a cytotoxine such as TMZ, BCNU, DTIC, 5-Fluorouracil (FU), gemcitabine, taxol (pacitaxel), irinoteca, oxaliplatin doxorubicin, cyclophosphamid, folinsaure, a chromophor, a marker for example a fluorescent marker such as FITC, rhodamine, phycoerytherin, phycocynin, allophycocyanin, o-phthaldehyde or fluorescamine, biotin, a contrast agent, a chemiluminescent agent such as luminol, isoluminol, aromatic acridinium ester, imidazole, acridinium salt, or oxalate ester, a bioluminscent agent such as luciferin, luciferase or aequorin, a hormone, a signal peptide, a lipid, a fatty acid, e.g., conjugated linoleic acid, a sugar, an amino acid, a receptor, a part of a receptor, or any ligand of a receptor for example an antagonist of the CXCR4 chemokine receptor or binding molecule, or glutathione which enhances the delivery of the conjugate via the glutathione transferase for example across the blood-brain-barrier. A compound of the present invention is preferably directed to the targeting and/or detecting of the oligonucleotide. Preferred cytokines are for example interferones such as α-, β- or γ-interferone (IFN), interleukins (IL) such as IL-1α, -1β, -2, -3 -4, -5, -6, -7, -8, -9, -10, -11, -12, -13, -16, -17, -18, -22, -23, or 31, or colony stimulating factors (CSF) such as CSF1, -2 (GM-CSF or sargramostin), or -3 (G-CSF or filgrastim), or a combination thereof. Preferred chemotherapeutics are for example alkylating agents, antimetabolites, anthracyclines, alkaloids, topoisomerase inhibitors, and antitumor agents, in particular temozolomide, gemcitabine, avastin, or a combination thereof.

[0083] In a preferred embodiment, a polymer such as polylakylene oxide, e.g., PEG is bound to the 5′-end and/or 3′-end of an oligonucleotide via native ligation resulting in a native ligation site, preferably comprising a cysteine residue, which is either protected to avoid interaction of a further polymer and/or compound with the native ligation site, or is bound to a polymer such as PEG, or a compound such as a small molecule, an antibody, an antigen, an enzyme, a part of an antibody, or an enzyme, any peptide, e.g., an internalizing peptide, an aptamer (based on nucleic acid, protein, or peptide), a spiegelmer, RNAi, shRNA, microRNA (miRNA) a chromophor, biotin, a hormone, a signal peptide, a lipid, a fatty acid, a sugar, an amino acid, a receptor, a part of a receptor, or any ligand of a receptor or binding molecule, optionally via a reversible or irreversible linker.

[0084] Preferably, hydroxy protecting groups are for example t-butyl, t-butoxymethyl, methoxymethyl, tetrahydropyranyl, 1-ethoxyethyl, 1-(2-chloroethoxy)ethyl, 2-trimethylsilyl ethyl, p-chlorophenyl, 2,4-dinitrophenyl, benzyl, 2,6-dichlorobenzyl, diphenylmethyl, p, dinitrobenzylhydryl, triphenylmethyl, trimethylsilyl, triethylsilyl, t-butyldimethylsilyl, t-butyldiphenylsilyl, triphenylsilyl, benzoylformate, acetate, chloroacetate, trichloroacetate, trifluoroacetate, pivaloate, benzoate, p-phenylbenzoate, 9-fluorenylmethyl carbonate, mesylate and tosylate.

[0085] Amino protecting groups are for example dimethoxytrityl (DMT), monomethoxyethyl (MMT), 2-trimethylsilylethoxycarbonyl (Teoc), 1-methyl-1-(4-biphenylyl)ethoxycarbonyl (Bpoc), t-butoxycarbonyl (BOC), allyloxycarbonyl (Alloc), 9-fluorenylmethyloxycarbonyl (Fmoc), benzyloxycarbonyl (Cbz); amide protecting groups such as formyl, acetyl, trihaloacetyl, benzoyl, and nitrophenylacetyl; sulfonamide protecting groups such as 2-nitrobenzenesulfonyl, or imine and cyclic imide protecting groups such as phthalimido and dithiasuccinoyl.

[0086] Carbonyl protecting groups are for example acetals, ketals, acylals, or dithianes. Carboxylic acid protecting groups are for example methyl esters, benzyl esters, tert-butyl esters, or silyl esters.

[0087] Thiol protecting reagents are for example ethyliodoacetate, an irreversible capping reagent, resulting in thioether, or dipyridyldisulfide, a reversible protection group, resulting in disulfide, Benzyl-S or tert. Butyl-S etc.

[0088] Equivalents of the protecting groups such as hydroxy protecting groups, carbonyl protecting groups, carboxylic acid protecting groups, thiol protecting groups or amino protecting groups are also encompassed by the conjugates or compounds and the methods of their production.

[0089] In a further preferred embodiment, the oligonucleotide conjugate of the present invention based on native ligation comprises a polyalkylene oxide, e.g., PEG at the 5′- and/or 3′-end, and optionally a polymer such as PEG and/or a compound like penetratin and/or an RGD peptide at the native ligation site, wherein the polyalkylene oxide such as PEG at both ends is identical in size or differs in size.

[0090] Polymers for example polyalkylene oxide, in particular PEG is available as polydispers or monodispers material. The polydispers material comprises dispers distribution of different molecular weight of the material, characterized by mean weight (weight average) size and dispersity. The monodispers PEG comprises one size of molecules. Polyalkylene oxide, preferably PEG, of the present invention is poly- or monodispers and the indicated molecular weight represents an average of the molecular weight of the polyalkylene oxide, e.g., PEG, molecules. Molecular weights indicated for polymers, in particular PEGs are often rounded; alternatively, polymers, in particular PEGs are indicated according to the number of monomers the polymer comprises, for example PEG4 comprises 4 monomers and has a molceular weight of 200.

[0091] For example the molecular weight of a polymer for example polyalkylene oxide such as PEG, which is linked to the 5′-end of the oligonucleotide is 200 (e.g., PEG 4), 300, 400 (e.g., PEG 8), 500, 600, 700, 800, 900, 1000 (e.g. PEG 24), 1250, 1500, 1750, 2000, 2250, 2500, 2750, 3000, 3250, 3500, 3750, 4000, 4250, 4500 or 4750, 5000, 10000, 20000, 50000 or 100000 Da and the molecular weight of the polyalkylene oxide linked to the 3′-end of the oligonucleotide is 200, 300, 400, 500, 600, 700, 800, 900, 1000, 1250, 1500, 1750, 2000, 2250, 2500, 2750, 3000, 3250, 3500, 3750, 4000, 4250, 4500 or 4750, 5000, 10000, 20000, 50000 or 100000 Da, or the molecular weight of the polymer for example polyalkylene oxide such as PEG linked to the 3′-end of the oligonucleotide is 200, 300, 400, 500, 600, 700, 800, 900, 1000, 1250, 1500, 1750, 2000, 2250, 2500, 2750, 3000, 3250, 3500, 3750, 4000, 4250, 4500 or 4750, 5000, 10000, 20000, 50000 or 100000 Da and the molecular weight of the polymer for example polyalkylene oxide such as PEG linked to the 5′-end of the oligonucleotide is 200, 300, 400, 500, 600, 700, 800, 900, 1000, 1250, 1500, 1750, 2000, 2250, 2500, 2750, 3000, 3250, 3500, 3750, 4000, 4250, 4500 or 4750, 5000, 10000, 20000, 50000 or 100000 Da, or the molecular weight of the polymer for example polyalkylene oxide such as PEG linked to the 5′-end and/or the 3′-end of the oligonucleotide is 200, 300, 400, 500, 600, 700, 800, 900, 1000, 1250, 1500, 1750, 2000, 2250, 2500, 2750, 3000, 3250, 3500, 3750, 4000, 4250, 4500 or 4750, 5000, 10000, 20000, 50000 or 100000 Da and the molecular weight of the polymer for example polyalkylene oxide such as PEG linked to the native ligation site is 200, 300, 400, 500, 600, 700, 800, 900, 1000, 1250, 1500, 1750, 2000, 2250, 2500, 2750, 3000, 3250, 3500, 3750, 4000, 4250, 4500 or 4750, 5000, 10000, 20000, 50000 or 100000 Da, or the molecular weight of the polymer for example polyalkylene oxide such as PEG linked to the native ligation site is 200, 300, 400, 500, 600, 700, 800, 900, 1000, 1250, 1500, 1750, 2000, 2250, 2500, 2750, 3000, 3250, 3500, 3750, 4000, 4250, 4500 or 4750, 5000, 10000, 20000, 50000 or 100000 Da and the molecular weight of the polymer for example polyalkylene oxide such as PEG linked to the 5′-end and/or the 3′-end of the oligonucleotide is 200, 300, 400, 500, 600, 700, 800, 900, 1000, 1250, 1500, 1750, 2000, 2250, 2500, 2750, 3000, 3250, 3500, 3750, 4000, 4250, 4500 or 4750, 5000, 10000, 20000, 50000 or 100000 Da. Polymers, in particular PEGs of the present invention are preferably monodispers polymers and PEGs, respectively.

[0092] In a further preferred embodiment, the modified oligonucleotide comprises a polymer for example polyalkylene oxide such as PEG, and a compound for example an antibody and an internalizing peptide such as penetratin or an RGD peptide. The antibody guides the modified oligonucleotide to the target, and the PEG avoids amongst others and reduces, respectively, degradation of the modified oligonucleotide for example via 5′- and/or 3′-exonuclease, and/or endonuclease. Once the target is reached, the antibody and/or the PEG is/are separated from the modified oligonucleotide, preferably via a reversible linker such as a disulfide binding, and the internalizing peptide promotes entrance of the oligonucleotide into the target cell. Alternatively, the modified oligonucleotide comprises a polymer such as PEG at the 5′-end or at the 5′- and 3′-end of the oligonucleotide, and a compound such as an antibody at the 3′-end or at the native ligation site of the oligonucleotide for example. Once the target is reached, the modified oligonucleotide interacts with the surface of the target cell.

[0093] In a further alternative, an oligonucleotide comprises a polymer for example PEG at its 5′- and 3′-end, which are connected to the oligonucleotide via native ligation, resulting in two native ligation sites at the 5′- and the 3-end of the oligonucleotide. A compound like an antibody, e.g., for targeting, and an internalizing peptide such as penetratin are connected independently to one of the native ligation sites. Once the target is reached, the antibody is removed from the oligonucleotide and/or the compounds, e.g., the PEGs are removed and the penetratin improves the incorporation of the oligonucleotide into the cell.

[0094] In another embodiment, a solid phase is connected to the 3′-end and/or the native ligation site of the modified oligonucleotide comprising a polymer and/or a compound at the 5′-end. Such combination forms for example the basis for a test kit using the modified oligonucleotide for the detection of a cell or cell factor.

[0095] The following examples will further illustrate the present invention without limiting the subject matter of the present invention to these examples.

### EXAMPLES

[0096] The present invention is further described with references to the following examples, wherein the invention is not limited to the examples. The oligonucleotides used in the following examples were preferably SEQ ID No. 2030, 2031, 2032, 2057, 2066, and 2461, in particular SEQ ID No. 2030.

### Example 1

### Synthesis of a 5′-Cysteine-Modified Oligonucleotide-Thiophosphate (FIG. 3)

[0097] Synthesis of an oligonucleotide having a phosphorothioate backbone on a DNA/RNA sythesizer according to a modified synthesis protocol comprising double coupling cycles on an amino-on-support in a 2 μmol scale (2 μmol net weight of functional groups of the support per cartridge). In the last step comprising a single coupling step, a cysteine modifier such as OMR (oligonucleotide-modifying reagens for example Link-technologies Ltd., Lanarkshire, Scotland) dissolved in 0.1 M acetonitril was connected to the 5′-end of the oligonucleotide, wherein the OMR is protected with a Fmoc and a tertiary Butyl-S-(tBu-S) protecting group. Once, the synthesis of the oligonucleotide is finished, the Fmoc protecting group is removed from the OMR using 20% piperidine in dimethyl formamide (DMF). Piperidine is then removed by washing the oligonucleotide in pure DMF, which is finally removed by acetonitril. The support is removed from the cartridge, dried at 37° C. then the oligonucleotide is cleaved from the solid support by ammonia overnight, preferably by concentrated ammonia at 55° C.

[0098] The final product is purified via HPLC, wherein the eluate is collected and the volume of the eluate is reduced via ultracentrifugation or ultrafiltration, quantified, dried preferably in a speedvac and stored at −20° C. The identity of the product is controlled via MALDI-TOF-MS.

### Example 2

### Production of a PMR-Modified PEG Component (FIG. 4)

[0099] Starting material for the PEG modified with a thioester is for example common amino functionalized PEG and PMR (peptide-modifying reagents (pentafluorophenyl-5-benzyl-thiosuccinat) for example Link-technologies Ltd., Lanarkshire, Scotland). 100 pmol methoxy-PEG-NH2 of MW 400 (mPEG400-NH2), i.e., 400 μl of a 250 mM solution in DMF, is mixed with a 1.5× excess of PMR, i.e., 150 pmol (58 mg) in 100 μl DMF, and added to 5000 solution of 30 μmol (4.6 mg) HOBt (N-hydroxybenzotriazole). The composition is incubated for 30 min. at 37° C. The reaction is controlled using an analytic RP-HPLC, wherein the mPEG400-PMR forms a sharp peak, and the isolation of mPEG400-PMR was likewise performed on RP-HPLC. The isolated PEG400-PMR is dried, ultrafiltrated, and/or ultracentrifuged and stored at −20° C.

### Example 3

### Modification of the 5′-End of a 5′-OMR-Modified Oligonucleotide Via Native Ligation (FIG. 5)

[0100] The modification of the 5′-end of the oligonucleotide is based on the reaction of the thioester of the PEG-PMR component, for example the mPEG400-PMR component (see example 2), with the cytseine residue of the OMR-modified oligonucleotide (see example 1). In a first step an intermediate thioester bond is formed followed by an intramolecular acyl rearrangement resulting in an amide bond, i.e., native ligation.

[0101] The reaction buffer for the native ligation comprises 100 mM Tris(carboxyethyl)phosphine (TCEP), 50 mM Triethylammonium acetate (TEAA) pH7.5, and 25 mM Mercaptophenyl acetic acid (MPAA) for an oligonucleotide concentration of 1 nmol/μl and an mPEG400-PMR concentration of 10 nmol/μl.

[0102] In a first step the 5′-OMR-modified oligonucleotide comprising cysteine is chemically reduced via TCEP to remove the tertiary Butyl-S (tBu-S) protecting group from the cysteine residue of the 5′-OMR-modified oligonucleotide. The mixture is incubated for 1 h at 37° C., and the reaction is controlled using RP-HPLC.

[0103] Parallel, in a second independent step, the PEG-PMR-compound/-polymer such as the mPEG400-PMR is activated via MPAA by interacting with the mPEG-PMR and exchanging the Benzyl-S (Bn-S) group of the thioester; this mixture is likewise incubated for 1 h at 37° C., and the reaction is controlled using RP-HPLC.

[0104] The combination of the reduced oligonucleotide of step one and the activated PEG-PMR-compound/-polymer of step two, and the incubation at 37° C. leads to native ligation resulting in the final product of the reaction comprising an amide bond. Reaction time is between 24 and 200 h.

### Example 4

### Protection of the Thiol Residue Via Dipyridyldisulfide (FIG. 6)

[0105] The thiol function of the cysteine-residue of the PEG-PMR-oligonucleotide intermediate product, which is the direct product of native ligation (see example 3), is protected by adding an 1000× molar excess of dipyridyldisulfide (1M Dithiopyridin, Py2S2 dissolved in methanol) to the reaction buffer of example 3; the mixture is incubated at 37° C. for about 20 h; alternatively DTNB or Ellman's reagens were used. The resulting product, which is for example a mPEG400-PMR, 5′-end PEG modified oligonucleotide comprising cysteine having a protecting group at the cysteine residue, is isolated via ultrafiltration and RP-HPLC; the final product is dried and stored at −20° C.

### Example 5

### Modification of the 3′-End of a Native Ligation Modified Oligonucleotide (FIG. 7)

[0106] The modification of the 3′-end of the 5′-end native ligation modified oligonucleotide comprising a pyridyl-disulfide protected cysteine (see example 4) is based on the reaction of the 3′-terminal amino function with for example PEG-NHS such as mPEG2000-NHS. Reaction buffer is 0.3M NaHCO₃ pH 8.5 for an oligonucleotide concentration of 1 mM. About 10 times 3× excess of mPEG-NHS is added to the 5′-end PEG modified oligonucleotide, and is incubated at 37° C. for 10 min. The reaction is controlled via RP-HPLC, and the final product is isolated via RP-HPLC, IE-FPLC, or ultrafiltration which is subsequently dried for example in a speedvac, and stored at −20° C.

### Example 6

### Stability of an Unmodified Oligonucleotide Against Endonuclease, 5′-Exonuclease, and 3′-Endonuclease, Respectively

[0107] An unmodified oligonucleotide comprising 18 nucleotides and a phosphate or a thiophosphate backbone was incubated with S1 endonuclease (0.005 U/μl, i.e., 0.05 Upper nmol oligonucleotide) in 70 mM Tris-HCl, 50 mM NaCl, 20 mM MgCl₂, pH 7 at 37° C.

[0108] A second sample of the unmodified oligonucleotide was incubated with 5′-exonuclease (for example phosphodiesterase II (PDE II)) in 0.1 M TEAA buffer pH 6.5 (0.018 U/μl, i.e., 0.18 Upper nmol oligonucleotide), and a third group of the unmodified oligonucleotide was incubated with 3′-exonuclease (for example phosphodiesterase I (PDE I)) in 100 mM Tris-HCl, 100 mM NaCl, 14 mM MgCl₂, pH 8.8 (0.0001 U/μl, i.e., 0.001 Upper nmol oligonucleotide).

[0109] The results are presented in the following, wherein the amount of oligonucleotide at t=0 was set 100%. The degradation of the oligonucleotides of all three samples was tested by RP-HPLC directly at the start of the experiment (t=0), after 1 h, 24 h, 48 h, and 144 h. Table 1 shows the results of the endonuclease, table 2 of the 5′-exonuclease, and table 3 of the 3′-exonuclease.

TABLE 1
Effect of the endonuclease (S1)

| | Unmodified oligonucleotide | Unmodified oligonucleotide |
|---|---|---|
| | comprising | comprising |
| | phosphate backbone | thiophosphate backbone |
| 0 h | 100% | 100% |
| 1 h | 16% | 21% |
| 24 h | —* | 4% |
| 48 h | —* | —* |
| 144 h | —* | —* |

*No oligonucleotide detectable at 24 h, 48 h and 144 h

TABLE 2
Effect of the 5′-exonuclease (PDE II)

| | Unmodified oligonucleotide | Unmodified oligonucleotide |
|---|---|---|
| | comprising | comprising |
| | phosphate backbone | thiophosphate backbone |
| 0 h | 100% | 100% |
| 1 h | 24% | 100% |
| 24 h | 16% | 86% |
| 48 h | —* | 79% |
| 144 h | —* | 63% |

*No oligonucleotide detectable at 48 h and 144 h

TABLE 3
Effect of the 3′-exonuclease (PDE I)

| | Unmodified oligonucleotide | Unmodified oligonucleotide |
|---|---|---|
| | comprising | comprising |
| | phosphate backbone | thiophosphate backbone |
| 0 h | 100% | 100% |
| 1 h | 30% | 96% |
| 24 h | —* | 66% |
| 48 h | —* | 54% |
| 144 h | —* | 20% |

*No oligonucleotide detectable at 24 h, 48 h and 144 h

### Example 7

### Stability of the Modified Oligonucleotides Against Endonuclease

[0110] A modified oligonucleotide comprising a thiophosphate backbone was bound to mPEG400 at the 5′-end of the oligonucleotide via native ligation and to mPEG2000 (mPEG400-Oligo-mPEG2000) at the 3′-end via NHS ester coupled to the 3′-aminofunction of the oligonucleotide and incubated with S1 endonuclease (0.005 U/μl, i.e., 0.05 Upper nmol oligonucleotide) in 70 mM Tris-HCl, 50 mM NaCl, 20 mM MgCl₂, pH 7 at 37° C. The degradation of the oligonucleotide was tested by RP-HPLC directly at the start of the experiment (t=0), after 1 h, 24 h, 48 h, and 144 h. Table 4 shows the results of these experiments.

TABLE 4
Effect of the endonuclease (S1)

| | mPEG400-Oligo-mPEG2000 |
|---|---|
| 0 h | 100% |
| 1 h | 100% |
| 24 h | 90% |
| 48 h | 85% |
| 144 h | 66% |

[0111] The modified oligonucleotides show a higher stability than the unmodied oligonucleotides of table 1.

### Example 8

### Testing Stability of the Modified Oligonucleotides Against Endonuclease on PAGE (FIG. 9a-c)

[0112] An unmodified oligonucleotide and modified oligonucleotides comprising a thiophosphate backbone were incubated with S1 endonuclease (0.005 U/μl, i.e., 0.05 Upper nmol oligonucleotide) in 70 mM Tris-HCl, 50 mM NaCl, 20 mM MgCl₂, pH 7 at 37° C. The modified oligonucleotides were either bound to mPEG400 at the 5′-end of the oligonucleotide via native ligation and to mPEG1000 (mPEG400-Oligo-mPEG1000) at the 3′-end via NHS ester or to mPEG1000 at the 5′-end of the oligonucleotide via native ligation and to mPEG1000 (mPEG1000-Oligo-mPEG400) at the 3′-end via NHS ester. The degradation of the oligonucleotides was tested by PAGE directly at the start of the experiment (t=0), after 1 h, 24 h, 48 h, 72 h, and 144 h. 1 μl (0.01 nmol) of each sample was mixed with 5 μl formamide and the samples were separated on a polyacrylamid gel via polyacrylamid gel electrophoresis (PAGE) comprising 6.3 g urea, 7.5 ml acrylamid/bisacrylamid 19:1 (40%), 1.5. ml TBE buffer (10×), 1.5 ml water, 90 μl Amoniumpersulfat (APS) and 7 μl N,N,N′,N′-Tetramethylenethylenediamine (TEMED). Current time of the gel was about 2.5 h at 5 mA. The weight marker on the gel comprises 0.01 nmol mPEG1000-Oligo-mPEG1000, mPEG400-Oligo-mPEG400, unmodified oligonucleotide, unmodified oligonucleotide (n−1), and unmodified oligonucleotide (n−2) (decreasing size).

[0113] FIG. 9a shows the results of the unmodified oligonucleotide, FIG. 9b of the mPEG400-Oligo-mPEG1000, and FIG. 9c of the mPEG1000-Oligo-mPEG400, which demonstrate an increased stability of mPEG400-Oligo-mPEG1000 and mPEG1000-Oligo-mPEG400 against S1 endonuclease incubation.

### Example 9

### Stability of the Modified Oligonucleotides Against 5′-Exonuclease (PDE II)

[0114] A modified oligonucleotide comprising a thiophosphate backbone was bound to mPEG400 at the 5′-end of the oligonucleotide via native ligation and to PEG1000 at the 3′-end of the oligonucleotide via reaction of an NHS ester with the 3′-aminofunction (mPEG400-Oligo-mPEG1000) and was incubated with 5′-exonuclease in 0.1 M TEAA buffer pH 6.5 (0.018 U/μl, i.e., 0.18 Upper nmol oligonucleotide), at 37° C. The degradation of the oligonucleotide was tested directly at the start of the experiment (t=0), after 1 h, 24 h, 48 h, and 144 h. Table 5 shows the results of these experiments.

TABLE 5
Effect of the 5′-exonuclease (PDE II)

| | mPEG400-Oligo-mPEG1000 |
|---|---|
| 0 h | 100% |
| 1 h | 97% |
| 24 h | 95% |
| 48 h | 92% |
| 144 h | 91% |

[0115] The modified oligonucleotides show a higher stability than the unmodied oligonucleotides of table 2.

### Example 10

### Testing Stability of the Modified Oligonucleotides Against 5′-Exonuclease (PDE II) on PAGE (FIG. 10a-c)

[0116] An unmodified oligonucleotide and modified oligonucleotides comprising a thiophosphate backbone were incubated with 5′-exonuclease (0.018 U/μl, i.e., 0.18 Upper nmol oligonucleotide) in 0.1M TEAA buffer pH 6.5 at 37° C. The modified oligonucleotides were either bound to mPEG400 at the 5′-end of the oligonucleotide via native ligation and to mPEG1000 (mPEG400-Oligo-mPEG1000) at the 3′-end via NHS ester or to mPEG1000 at the 5′-end of the oligonucleotide via native ligation and to mPEG1000 (mPEG1000-Oligo-mPEG400) at the 3′-end via NHS ester. The degradation of the oligonucleotides was tested by RP-HPLC directly at the start of the experiment (t=0), after 1 h, 24 h, 48 h, 72 h, and 144 h. The samples were tested on PAGE according to Example 8.

[0117] FIG. 10a shows the results of the unmodified oligonucleotide, FIG. 10b of the mPEG400-Oligo-mPEG1000, and FIG. 10c of the mPEG1000-Oligo-mPEG400, which demonstrate an increased stability of mPEG400-Oligo-mPEG1000 and mPEG1000-Oligo-mPEG400 against 5′-exonuclease incubation.

### Example 11

### Stability of the Modified Oligonucleotides Against 3′-Exonuclease (PDE I)

[0118] A modified oligonucleotide comprising a thiophosphate backbone was bound to mPEG400 at the 5′-end of the oligonucleotide via native ligation and to mPEG1000 at the 3′-end of the oligonucleotide via NHS ester (mPEG400-Oligo-mPEG1000) and was incubated with 3′-exonuclease in 100 mM Tris-HCl, 100 mM NaCl, 14 mM MgCl₂, pH 8.8 (0.0001 U/μl, i.e., 0.001 Upper nmol oligonucleotide) at 37° C. The degradation of the oligonucleotide was tested by RP-HPLC directly at the start of the experiment (t=0), after 1 h, 24 h, 48 h, and 144 h. Table 6 shows the results of these experiments.

TABLE 6
Effect of the 3′-exonuclease (PDE I)

| | PEG400-Oligo-PEG1000 |
|---|---|
| 0 h | 100% |
| 1 h | 98% |
| 24 h | 79% |
| 48 h | 62% |
| 144 h | 44% |

[0119] The modified oligonucleotides show a higher stability than the unmodied oligonucleotides of table 3.

### Example 12

### Testing Stability of the Modified Oligonucleotides Against 3′-Exonuclease (PDE I) on PAGE (FIG. 11a-c)

[0120] An unmodified oligonucleotide and modified oligonucleotides comprising a thiophosphate backbone were incubated with 3′-exonuclease (0.0001 U/μl, i.e., 0.001 Upper nmol oligonucleotide) in 100 mM Tris-HCl buffer 100 mM NaCl, 14 mM MgCl₂, pH 8.8 at 37° C. The modified oligonucleotides were either bound to mPEG400 at the 5′-end of the oligonucleotide via native ligation and to mPEG1000 (mPEG400-Oligo-mPEG1000) at the 3′-end via NHS ester or to mPEG1000 at the 5′-end of the oligonucleotide via native ligation and to mPEG1000 (mPEG1000-Oligo-mPEG400) at the 3′-end via NHS ester. The degradation of the oligonucleotides was tested by PAGE directly at the start of the experiment (t=0), after 1 h, 24 h, 48 h, 72 h, and 144 h. The samples were tested on PAGE according to Example 8. FIG. 11a shows the results of the unmodified oligonucleotide, FIG. 11b of the mPEG400-Oligo-mPEG1000, and FIG. 11c of the mPEG1000-Oligo-mPEG400, which demonstrate an increased stability of mPEG400-Oligo-mPEG1000 and mPEG1000-Oligo-mPEG400 against 3′-exonuclease incubation.

### Example 13

### Oligonucleotides

[0121] The TGF-beta1, TGF-beta2 and TGF-beta3 oligonucleotides, in particular antisense oligonucleotides, of this example are bound to a polymer and/or compound according to the method of the present invention, which are suitable for controlling, preventing, and/or treating of unwanted neoplasms, formation of metastases, fibrosis or viral diseases or disorders such as HIV as described in this invention.

[0122] TGF-Beta1, -2 and -3 Antisense Oligonucleotides:

| | |
|---|---|
| gtgccatcaatacctgcaaa, | (SEQ ID No. 1) |
| catcagttacatcgaaggag, | (SEQ ID No. 2) |
| tcttgggacacgcagcaagg, | (SEQ ID No. 3) |
| gaaatcaatgtaaagtggac, | (SEQ ID No. 4) |
| catgaactggtccatatcga, | (SEQ ID No. 5) |
| gaggttctaaatcttgggac, | (SEQ ID No. 6) |
| gcactctggcttttgggttc, | (SEQ ID No. 7) |
| tagctcaatccgttgttcag, | (SEQ ID No. 8) |
| ccctagatccctcttgaaat, | (SEQ ID No. 9) |
| accaaggctctcttatgttt, | (SEQ ID No. 10) |
| tcgagtgtgctgcaggtaga, | (SEQ ID No. 11) |
| tgaacagcatcagttacatc, | (SEQ ID No. 12) |
| gctgggttggagatgttaaa, | (SEQ ID No. 13) |
| agaggttctaaatcttggga, | (SEQ ID No. 14) |
| cgccggttggtctgttgtga, | (SEQ ID No. 15) |
| ctgctttcaccaaattggaa, | (SEQ ID No. 16) |
| aagtatagatcaaggagagt, | (SEQ ID No. 17) |
| tgctcaggatctgcccgcgg, | (SEQ ID No. 18) |
| gtgctgttgtagatggaaat, | (SEQ ID No. 19) |
| agggcggcatgtctattttg, | (SEQ ID No. 20) |
| taagcttattttaaatccca, | (SEQ ID No. 21) |
| tagctgcatttgcaagactt, | (SEQ ID No. 22) |
| tctgttgtgactcaagtctg, | (SEQ ID No. 23) |
| aagcaataggccgcatccaa, | (SEQ ID No. 24) |
| tcaatgtaaagtggacgtag, | (SEQ ID No. 25) |
| attttagctgcatttgcaag, | (SEQ ID No. 26) |
| tgtagatggaaatcacctcc, | (SEQ ID No. 27) |
| ttaacactgatgaaccaagg, | (SEQ ID No. 28) |
| attgtaccctttgggttcgt, | (SEQ ID No. 29) |
| agatccctcttgaaatcaat, | (SEQ ID No. 30) |
| tgtaaagtggacgtaggcag, | (SEQ ID No. 31) |
| ccattcgccttctgctcttg, | (SEQ ID No. 32) |
| tgttaaatctttggacttga, | (SEQ ID No. 33) |
| gaagggcggcatgtctattt, | (SEQ ID No. 34) |
| gaccctgctgtgctgagtgt, | (SEQ ID No. 35) |
| gaactagtaccgccttttca, | (SEQ ID No. 36) |
| cgatcctcttgcgcatgaac, | (SEQ ID No. 37) |
| ccggccaaaagggaagagat, | (SEQ ID No. 38) |
| aaagagacgagtggctatta, | (SEQ ID No. 39) |
| aagtggaaatattaatacgg, | (SEQ ID No. 40) |
| agatcaaggagagttgtttg, | (SEQ ID No. 41) |
| agttgtttttaaaagtcaga, | (SEQ ID No. 42) |
| tgtaacaactgggcagacag, | (SEQ ID No. 43) |
| ggtgttgtaacaactgggca, | (SEQ ID No. 44) |
| tacccacagagcacctggga, | (SEQ ID No. 45) |
| gggatggcatcaaggtaccc, | (SEQ ID No. 46) |
| tcgtcatcatcattatcatc, | (SEQ ID No. 47) |
| aagggtgcctattgcatagc, | (SEQ ID No. 48) |
| ctcactgttaactctaagag, | (SEQ ID No. 49) |
| gcaaagtatttggtctccac, | (SEQ ID No. 50) |
| caagttccttaagccatcca, | (SEQ ID No. 51) |
| ttatcttaatgcagactttc, | (SEQ ID No. 52) |
| cttacaagaagcttccttag, | (SEQ ID No. 53) |
| actggtgagcttcagcttgc, | (SEQ ID No. 54) |
| acttgagaatctgatatagc, | (SEQ ID No. 55) |
| aggttcctgtctttatggtg, | (SEQ ID No. 56) |
| gtgtatccatttccacccta, | (SEQ ID No. 57) |
| cagcacagaagttggcattg, | (SEQ ID No. 58) |
| gcaaggagaagcagatgctt, | (SEQ ID No. 59) |
| agcaaggagaagcagatgct, | (SEQ ID No. 60) |
| ttttccaagaattttagctg, | (SEQ ID No. 61) |
| ttcttgttacaagcatcatc, | (SEQ ID No. 62) |
| ttaaagaaggagcggttcgg, | (SEQ ID No. 63) |
| ctgggctgaaatttatatat, | (SEQ ID No. 64) |
| gggcagacagctaggagttt, | (SEQ ID No. 65) |
| gtgtactcaccaaggtaccc, | (SEQ ID No. 66) |
| cccagcactttgggaggccg, | (SEQ ID No. 67) |
| ggctcacgcctgtaatccca, | (SEQ ID No. 68) |
| tgaccgtgaactcactattt, | (SEQ ID No. 69) |
| atagtggtgatggctataca, | (SEQ ID No. 70) |
| ttttggttacctgcaaatct, | (SEQ ID No. 71) |
| gaacactcaccctgctgtgc, | (SEQ ID No. 72) |
| gaatggctctttaaacccta, | (SEQ ID No. 73) |
| gaagaaatggagttcagtgt, | (SEQ ID No. 74) |
| tttctcctggaagggagagg, | (SEQ ID No. 75) |
| aaatgcaacgcgttcccaac, | (SEQ ID No. 76) |
| aatacgaaacttttgcaaag, | (SEQ ID No. 77) |
| actagtaattctcagagcgg, | (SEQ ID No. 78) |
| aagaaactagtaattctcag, | (SEQ ID No. 79) |
| agtgcatgtttttaaaagga, | (SEQ ID No. 80) |
| cagtagtgcatgtttttaaa, | (SEQ ID No. 81) |
| ctcagcacacagtagtgcat, | (SEQ ID No. 82) |
| agatgcaggagcaaaaaggt, | (SEQ ID No. 83) |
| caggtagacagactgagcgc, | (SEQ ID No. 84) |
| gcctcgatcctcttgcgcat, | (SEQ ID No. 85) |
| gcggatggcctcgatcctct, | (SEQ ID No. 86) |
| ctcaggatctgcccgcggat, | (SEQ ID No. 87) |
| gctccggatagtcttccggg, | (SEQ ID No. 88) |
| agatggaaatcacctccggg, | (SEQ ID No. 89) |
| gttgtagatggaaatcacct, | (SEQ ID No. 90) |
| ctggtactgttgtagatgga, | (SEQ ID No. 91) |
| aggcggctgccctccggctt, | (SEQ ID No. 92) |
| aacctccttggcgtagtact, | (SEQ ID No. 93) |
| attttataaacctccttggc, | (SEQ ID No. 94) |
| cggcatgtcgattttataaa, | (SEQ ID No. 95) |
| cgggatggcattttcggagg, | (SEQ ID No. 96) |
| gtagggtctgtagaaagtgg, | (SEQ ID No. 97) |
| tgaagtagggtctgtagaaa, | (SEQ ID No. 98) |
| attctgaagtagggtctgta, | (SEQ ID No. 99) |
| aagcggacgattctgaagta, | (SEQ ID No. 100) |
| cccaggttcctgtctttgtg, | (SEQ ID No. 101) |
| ggcagtgtaaacttatttta, | (SEQ ID No. 102) |
| ccatcaatacctgcaaatct, | (SEQ ID No. 103) |
| aggtgccatcaatacctgca, | (SEQ ID No. 104) |
| agttttctgatcaccactgg, | (SEQ ID No. 105) |
| ttatagttttctgatcacca, | (SEQ ID No. 106) |
| cctagtggactttatagttt, | (SEQ ID No. 107) |
| acattagcaggagatgtggg, | (SEQ ID No. 108) |
| agggcaacaacattagcagg, | (SEQ ID No. 109) |
| actccagtctgtaggagggc, | (SEQ ID No. 110) |
| tcctgcacatttctaaagca, | (SEQ ID No. 111) |
| cagcaattatcctgcacatt, | (SEQ ID No. 112) |
| atgtaaagagggcgaaggca, | (SEQ ID No. 113) |
| ctcttaaaatcaatgtaaag, | (SEQ ID No. 114) |
| ccaagatccctcttaaaatc, | (SEQ ID No. 115) |
| cctttgggttcatggatcca, | (SEQ ID No. 116) |
| gcattgtaccctttgggttc, | (SEQ ID No. 117) |
| gcacagaagttagcattgta, | (SEQ ID No. 118) |
| ctgaggactttggtgtgttg, | (SEQ ID No. 119) |
| tcctgggacacacagcaagg, | (SEQ ID No. 120) |
| tttagctgcatttacaagac, | (SEQ ID No. 121) |
| caaggactttagctgcattt, | (SEQ ID No. 122) |
| gtcattgtcaccgtgatttt, | (SEQ ID No. 123) |
| ccagttttaacaaacagaac, | (SEQ ID No. 124) |
| agatgccagttttaacaaac, | (SEQ ID No. 125) |
| gttcattatatagtaacaca, | (SEQ ID No. 126) |
| atgaaaggttcattatatag, | (SEQ ID No. 127) |
| ttccaagggtaatgaaaggt, | (SEQ ID No. 128) |
| cttaagccatccatgagttt, | (SEQ ID No. 129) |
| cctggcttatttgagttcaa, | (SEQ ID No. 130) |
| ttagtcctataacaactcac, | (SEQ ID No. 131) |
| gcaaagaaccatttacaatt, | (SEQ ID No. 132) |
| cttgcttaaactggcaaaga, | (SEQ ID No. 133) |
| acatgtaaagtagttactgt, | (SEQ ID No. 134) |
| acacattacatgtaaagtag, | (SEQ ID No. 135) |
| taagatctacacattacatg, | (SEQ ID No. 136) |
| attcaaaggtactggccagc, | (SEQ ID No. 137) |
| tttgtagtgcaagtcaaaat, | (SEQ ID No. 138) |
| catgtcattaaatggacaat, | (SEQ ID No. 139) |
| cctacatttgtgcgaacttc, | (SEQ ID No. 140) |
| ttccccctttgaaaaactca, | (SEQ ID No. 141) |
| tttttaatcagcctgcaaag, | (SEQ ID No. 142) |
| actgggcagacagtttcgga, | (SEQ ID No. 143) |
| taacaactgggcagacagtt, | (SEQ ID No. 144) |
| tgttgtaacaactgggcaga, | (SEQ ID No. 145) |
| cacagagcacctgggactgt, | (SEQ ID No. 146) |
| gtacccacagagcacctggg, | (SEQ ID No. 147) |
| tcaaggtacccacagagcac, | (SEQ ID No. 148) |
| tggcatcaaggtacccacag, | (SEQ ID No. 149) |
| ggcgggatggcatcaaggta, | (SEQ ID No. 150) |
| tttgcaggtattgatggcac, | (SEQ ID No. 151) |
| ctccttcgatgtaactgatg, | (SEQ ID No. 152) |
| ccttgctgcgtgtcccaaga, | (SEQ ID No. 153) |
| tcgatatggaccagttcatg, | (SEQ ID No. 154) |
| gtcccaagatttagaacctc, | (SEQ ID No. 155) |
| gaacccaaaagccagagtgc, | (SEQ ID No. 156) |
| atttcaagagggatctaggg, | (SEQ ID No. 157) |
| aaacataagagagccttggt, | (SEQ ID No. 158) |
| tctacctgcagcacactcga, | (SEQ ID No. 159) |
| tcacaacagaccaaccggcg, | (SEQ ID No. 160) |
| ttccaatttggtgaaagcag, | (SEQ ID No. 161) |
| actctccttgatctatactt, | (SEQ ID No. 162) |
| ccgcgggcagatcctgagca, | (SEQ ID No. 163) |
| caaaatagacatgccgccct, | (SEQ ID No. 164) |
| tgggatttaaaataagctta, | (SEQ ID No. 165) |
| cagacttgagtcacaacaga, | (SEQ ID No. 166) |
| ttggatgcggcctattgctt, | (SEQ ID No. 167) |
| ctacgtccactttacattga, | (SEQ ID No. 168) |
| ggaggtgatttccatctaca, | (SEQ ID No. 169) |
| ccttggttcatcagtgttaa, | (SEQ ID No. 170) |
| acgaacccaaagggtacaat, | (SEQ ID No. 171) |
| attgatttcaagagggatct, | (SEQ ID No. 172) |
| ctgcctacgtccactttaca, | (SEQ ID No. 173) |
| caagagcagaaggcgaatgg, | (SEQ ID No. 174) |
| tcaagtccaaagatttaaca, | (SEQ ID No. 175) |
| aaatagacatgccgcccttc, | (SEQ ID No. 176) |
| acactcagcacagcagggtc, | (SEQ ID No. 177) |
| tgaaaaggcggtactagttc, | (SEQ ID No. 178) |
| gttcatgcgcaagaggatcg, | (SEQ ID No. 179) |
| atctcttcccttttggccgg, | (SEQ ID No. 180) |
| taatagccactcgtctcttt, | (SEQ ID No. 181) |
| ccgtattaatatttccactt, | (SEQ ID No. 182) |
| caaacaactctccttgatct, | (SEQ ID No. 183) |
| ctgtctgcccagttgttaca, | (SEQ ID No. 184) |
| tgcccagttgttacaacacc, | (SEQ ID No. 185) |
| tcccaggtgctctgtgggta, | (SEQ ID No. 186) |
| gatgataatgatgatgacga, | (SEQ ID No. 187) |
| gctatgcaataggcaccctt, | (SEQ ID No. 188) |
| ctcttagagttaacagtgag, | (SEQ ID No. 189) |
| gtggagaccaaatactttgc, | (SEQ ID No. 190) |
| gaaagtctgcattaagataa, | (SEQ ID No. 191) |
| ctaaggaagcttcttgtaag, | (SEQ ID No. 192) |
| gcaagctgaagctcaccagt, | (SEQ ID No. 193) |
| tagggtggaaatggatacac, | (SEQ ID No. 194) |
| caatgccaacttctgtgctg, | (SEQ ID No. 195) |
| aagcatctgcttctccttgc, | (SEQ ID No. 196) |
| cagctaaaattcttggaaaa, | (SEQ ID No. 197) |
| gatgatgcttgtaacaagaa, | (SEQ ID No. 198) |
| aaactcctagctgtctgccc, | (SEQ ID No. 199) |
| gggtaccttggtgagtacac, | (SEQ ID No. 200) |
| cggcctcccaaagtgctggg, | (SEQ ID No. 201) |
| tgggattacaggcgtgagcc, | (SEQ ID No. 202) |
| tgtatagccatcaccactat, | (SEQ ID No. 203) |
| acactgaactccatttcttc, | (SEQ ID No. 204) |
| cctctcccttccaggagaaa, | (SEQ ID No. 205) |
| gttgggaacgcgttgcattt, | (SEQ ID No. 206) |
| ccgctctgagaattactagt, | (SEQ ID No. 207) |
| ctgagaattactagtttctt, | (SEQ ID No. 208) |
| tttaaaaacatgcactactg, | (SEQ ID No. 209) |
| atgcactactgtgtgctgag, | (SEQ ID No. 210) |
| gcgctcagtctgtctacctg, | (SEQ ID No. 211) |
| atgcgcaagaggatcgaggc, | (SEQ ID No. 212) |
| agaggatcgaggccatccgc, | (SEQ ID No. 213) |
| atccgcgggcagatcctgag, | (SEQ ID No. 214) |
| cccggaagactatccggagc, | (SEQ ID No. 215) |
| cccggaggtgatttccatct, | (SEQ ID No. 216) |
| aggtgatttccatctacaac, | (SEQ ID No. 217) |
| tccatctacaacagtaccag, | (SEQ ID No. 218) |
| aagccggagggcagccgcct, | (SEQ ID No. 219) |
| agtactacgccaaggaggtt, | (SEQ ID No. 220) |
| gccaaggaggtttataaaat, | (SEQ ID No. 221) |
| tttataaaatcgacatgccg, | (SEQ ID No. 222) |
| cctccgaaaatgccatcccg, | (SEQ ID No. 223) |
| ccactttctacagaccctac, | (SEQ ID No. 224) |
| tttctacagaccctacttca, | (SEQ ID No. 225) |
| tacagaccctacttcagaat, | (SEQ ID No. 226) |
| tacttcagaatcgtccgctt, | (SEQ ID No. 227) |
| cacaaagacaggaacctggg, | (SEQ ID No. 228) |
| taaaataagtttacactgcc, | (SEQ ID No. 229) |
| tgcaggtattgatggcacct, | (SEQ ID No. 230) |
| ccagtggtgatcagaaaact, | (SEQ ID No. 231) |
| tggtgatcagaaaactataa, | (SEQ ID No. 232) |
| cctgctaatgttgttgccct, | (SEQ ID No. 233) |
| gccctoctacagactggagt, | (SEQ ID No. 234) |
| tgctttagaaatgtgcagga, | (SEQ ID No. 235) |
| tgccttcgccctctttacat, | (SEQ ID No. 236) |
| gattttaagagggatcttgg, | (SEQ ID No. 237) |
| tggatccatgaacccaaagg, | (SEQ ID No. 238) |
| gaacccaaagggtacaatgc, | (SEQ ID No. 239) |
| tacaatgctaacttctgtgc, | (SEQ ID No. 240) |
| ccttgctgtgtgtcccagga, | (SEQ ID No. 241) |
| gtcttgtaaatgcagctaaa, | (SEQ ID No. 242) |
| aaatgcagctaaagtccttg, | (SEQ ID No. 243) |
| aaaatcacggtgacaatgac, | (SEQ ID No. 244) |
| gttctgtttgttaaaactgg, | (SEQ ID No. 245) |
| gtttgttaaaactggcatct, | (SEQ ID No. 246) |
| tgtgttactatataatgaac, | (SEQ ID No. 247) |
| acctttcattacccttggaa, | (SEQ ID No. 248) |
| aaactcatggatggcttaag, | (SEQ ID No. 249) |
| aattgtaaatggttctttgc, | (SEQ ID No. 250) |
| tctttgccagtttaagcaag, | (SEQ ID No. 251) |
| acagtaactactttacatgt, | (SEQ ID No. 252) |
| ctactttacatgtaatgtgt, | (SEQ ID No. 253) |
| catgtaatgtgtagatctta, | (SEQ ID No. 254) |
| gctggccagtacctttgaat, | (SEQ ID No. 255) |
| ctttgcaggctgattaaaaa, | (SEQ ID No. 256) |
| aactgtctgcccagttgtta, | (SEQ ID No. 257) |
| tctgcccagttgttacaaca, | (SEQ ID No. 258) |
| acagtcccaggtgctctgtg, | (SEQ ID No. 259) |
| cccaggtgctctgtgggtac, | (SEQ ID No. 260) |
| gtgctctgtgggtaccttga, | (SEQ ID No. 261) |
| ctgtgggtaccttgatgcca, | (SEQ ID No. 262) |
| taccttgatgccatcccgcc, | (SEQ ID No. 263) |
| ttccaccattagcacgcggg, | (SEQ ID No. 264) |
| ccgtgaccagatgcaggatc, | (SEQ ID No. 265) |
| cccggagggcggcatggggga, | (SEQ ID No. 266) |
| cctcagggagaagggcgc, | (SEQ ID No. 267) |
| gtaggagggcctcgaggg, | (SEQ ID No. 268) |
| ctgcaggggctgggggtc, | (SEQ ID No. 269) |
| agggctggtgtggtgggg, | (SEQ ID No. 270) |
| ggcatgggggaggcggcg, | (SEQ ID No, 271) |
| ccggagggcggcatgggg, | (SEQ ID No. 272) |
| ggggggctggcgagccgc, | (SEQ ID No. 273) |
| ggacaggatctggccgcggatgg, | (SEQ ID No. 274) |
| ccccctggctcggggggc, | (SEQ ID No. 275) |
| gggccgggcggcacctcc, | (SEQ ID No. 276) |
| gggcagcgggccgggcgg, | (SEQ ID No. 277) |
| acggcctcgggcagcggg, | (SEQ ID No. 278) |
| gggtgctgttgtacaggg, | (SEQ ID No. 279) |
| gggtttccaccattagcacgcggg, | (SEQ ID No. 280) |
| tcatagatttcgtt, | (SEQ ID No. 281) |
| ttgtcatagattt, | (SEQ ID No. 282) |
| aagaacatatatatg, | (SEQ ID No. 283) |
| aagaacatatatat, | (SEQ ID No. 284) |
| ttgaagaacatatata, | (SEQ ID No. 285) |
| ccgggagagcaacacggg, | (SEQ ID No. 286) |
| acttttaacttga, | (SEQ ID No. 287) |
| attgttgctgtattt, | (SEQ ID No. 288) |
| attgttgctgtatt, | (SEQ ID No. 289) |
| aattgttgctgtatt, | (SEQ ID No. 290) |
| aattgttgctgtat, | (SEQ ID No. 291) |
| ggcgagtcgctgggtgccagcagccgg, | (SEQ ID No. 292) |
| ggcgagtcgctggg, | (SEQ ID No. 293) |
| acatcaaaagataa, | (SEQ ID No. 294) |
| tgacatcaaaagat, | (SEQ ID No. 295) |
| gggccctctccagcgggg, | (SEQ ID No. 296) |
| gggctcggcggtgccggg, | (SEQ ID No. 297) |
| ggggcagggcccgaggca, | (SEQ ID No. 298) |
| ggctccaaatgtaggggc, | (SEQ ID No. 299) |
| cgggttatgctggttgtacagggc, | (SEQ ID No. 300) |
| cggcgccgccgaggcgcccggg, | (SEQ ID No. 301) |
| ggggcggggcgggacc, | (SEQ ID No. 302) |
| gggcggggcggggcgggg, | (SEQ ID No. 303) |
| gggcggggtggggccggg, | (SEQ ID No. 304) |
| gggcaaggcagcgggggcgggg, | (SEQ ID No. 305) |
| cggtagcagcagcg, | (SEQ ID No. 306) |
| ccagtagccacagc, | (SEQ ID No. 307) |
| gcaggtggatagtcc, | (SEQ ID No. 308) |
| cttgcaggtggatag, | (SEQ ID No. 309) |
| cgatagtcttgcagg, | (SEQ ID No. 310) |
| ccatgtcgatagtcttgc, | (SEQ ID No. 311) |
| ctcgatgcgcttccg, | (SEQ ID No. 312) |
| cctcgatgcgcttcc, | (SEQ ID No. 313) |
| ggatggcctcgatgc, | (SEQ ID No. 314) |
| ggacaggatctggcc, | (SEQ ID No. 315) |
| cgcagcttggacagg, | (SEQ ID No. 316) |
| gagccgcagcttgg, | (SEQ ID No. 317) |
| cgagccgcagcttg, | (SEQ ID No. 318) |
| acctccccctggct, | (SEQ ID No. 319) |
| ccaccattagcacg, | (SEQ ID No. 320) |
| gaacttgtcatagatttc, | (SEQ ID No. 321) |
| gctgtgtgtactctgc, | (SEQ ID No. 322) |
| gctccacgtgctgc, | (SEQ ID No. 323) |
| gaattgttgctgtatttc, | (SEQ ID No. 324) |
| gccaggaattgttgc, | (SEQ ID No. 325) |
| gtgacatcaaaagataac, | (SEQ ID No. 326) |
| ggctcaaccactgcc, | (SEQ ID No. 327) |
| gctgtcacaggagc, | (SEQ ID No. 328) |
| cctgctgtcacagg, | (SEQ ID No. 329) |
| gcagtgtgttatccctgc, | (SEQ ID No. 330) |
| gcagtgtgttatccc, | (SEQ ID No. 331) |
| ccaggtcacctcgg, | (SEQ ID No. 332) |
| gccatgaatggtggc, | (SEQ ID No. 333) |
| gccatgaatggtgg, | (SEQ ID No. 334) |
| ccatgagaagcagg, | (SEQ ID No. 335) |
| ggaagtcaatgtacagc, | (SEQ ID No. 336) |
| ccacgtagtacacgatgg, | (SEQ ID No. 337) |
| gcacttgcaggagc, | (SEQ ID No. 338) |
| ccatggcagtgacc, | (SEQ ID No. 339) |
| ggctcctccatggc, | (SEQ ID No. 340) |
| gctaggatctgactgc, | (SEQ ID No. 341) |
| cctgactcagaggg, | (SEQ ID No. 342) |
| ggtctgaaaatgtttcc, | (SEQ ID No. 343) |
| ccattgcttgggacgg, | (SEQ ID No. 344) |
| gcatcaaatcatcc, | (SEQ ID No. 345) |
| ccattgttcaatatcg, | (SEQ ID No. 346) |
| ggtcttcagtgaacc, | (SEQ ID No. 347) |
| ggagcttcatctggacc, | (SEQ ID No. 348) |
| cctctggcattctgg, | (SEQ ID No. 349) |
| agggacagaagatg, | (SEQ ID No. 350) |
| gttttctgggaagg, | (SEQ ID No. 351) |
| ggttttctgggaag | (SEQ ID No. 352) |
| aggttttctgggaag, | (SEQ ID No. 353) |
| gtaggttttctggg, | (SEQ ID No. 354) |
| ggtaggttttctgg, | (SEQ ID No. 355) |
| ccagaatgcaagaagcc, | (SEQ ID No. 356) |
| gctgtcccagaatgc, | (SEQ ID No. 357) |
| gcaagtcacagacttggc, | (SEQ ID No. 358) |
| ccacagctgcacagg, | (SEQ ID No. 359) |
| ggtgtggaatcaacc, | (SEQ ID No. 360) |
| gtcatgtgctgtga, | (SEQ ID No. 361) |
| cgctatctgagcagcg, | (SEQ ID No. 362) |
| ccagtgtgatgatgg, | (SEQ ID No. 363) |
| ccagtagattaccactgg, | (SEQ ID No. 364) |
| ggcacaaacacgcacc, | (SEQ ID No. 365) |
| ccacggatctgaagg, | (SEQ ID No. 366) |
| cggaacatctcgaagcg, | (SEQ ID No. 367) |
| cctcattcagctctcgg, | (SEQ ID No. 368) |
| ccttgagttccaagg, | (SEQ ID No. 369) |
| cctttttggacttcagg, | (SEQ ID No. 370) |
| ggaggtagactgaccc, | (SEQ ID No. 371) |
| aaaatgtttcct, | (SEQ ID No. 372) |
| tgaaaatgtttc, | (SEQ ID No. 373) |
| ctgaaaatgttt, | (SEQ ID No. 374) |
| tctgaaaatgttt, | (SEQ ID No. 375) |
| tctgaaaatgtt, | (SEQ ID No. 376) |
| aaatcatccatt, | (SEQ ID No. 377) |
| ttgttcaatatc, | (SEQ ID No. 378) |
| attgttcaatatc, | (SEQ ID No. 379) |
| attgttcaatat, | (SEQ ID No. 380) |
| cattgttcaatat, | (SEQ ID No. 381) |
| cattgttcaata, | (SEQ ID No. 382) |
| aaaagtgtttct, | (SEQ ID No. 383) |
| acatgagttttttat, | (SEQ ID No. 384) |
| aacatgagttttttat, | (SEQ ID No. 385) |
| acatgagtttttta, | (SEQ ID No. 386) |
| aacatgagtttttta, | (SEQ ID No. 387) |
| aacatgagtttttt, | (SEQ ID No. 388) |
| aaaacatcttgtt, | (SEQ ID No. 389) |
| cagagggggctcgacgc, | (SEQ ID No. 390) |
| ctgactcagagggggctc, | (SEQ ID No. 391) |
| agggggacagaacg, | (SEQ ID No. 392) |
| ttgggacggcaagggggacagaa, | (SEQ ID No. 393) |
| tgggacggcaaggggga, | (SEQ ID No. 394) |
| gccacggggggagca, | (SEQ ID No. 395) |
| gcaggggccacggggggag, | (SEQ ID No. 396) |
| aggggccacggggg, | (SEQ ID No. 397) |
| caggggccacgggg, | (SEQ ID No. 398) |
| ggtgcaggggccacg, | (SEQ ID No. 399) |
| tggtgcaggggccgccgg, | (SEQ ID No. 400) |
| ggggctggtgcaggggcc, | (SEQ ID No. 401) |
| agggggctggtgcagggg, | (SEQ ID No. 402) |
| gggctggtgcaggg, | (SEQ ID No. 403) |
| gagggggctggtgcag, | (SEQ ID No. 404) |
| aggagggggctggtg, | (SEQ ID No. 405) |
| gggccaggagggggctgg, | (SEQ ID No. 406) |
| aggggccaggagggggct, | (SEQ ID No. 407) |
| ggggccaggagggg, | (SEQ ID No. 408) |
| caggggccaggaggg, | (SEQ ID No. 409) |
| tctgggaagggacaga, | (SEQ ID No. 410) |
| tgagggcaggggagta, | (SEQ ID No. 411) |
| ttgagggcaggggag, | (SEQ ID No. 412) |
| cgggtgccgggcgggggtg, | (SEQ ID No. 413) |
| cggacgcgggtgccgggcgggggt, | (SEQ ID No. 414) |
| cgggtgccgggcggg, | (SEQ ID No. 415) |
| ggacgcgggtgccgggcg, | (SEQ ID No. 416) |
| tgggggcagcgcctcaca, | (SEQ ID No. 417) |
| ggtgggggcagcgcct, | (SEQ ID No. 418) |
| ccattttagtgcacatccgg, | (SEQ ID No. 419) |
| ccattttagtgcacatcc, | (SEQ ID No. 420) |
| gctgttccattttagtgc, | (SEQ ID No. 421) |
| gtagtcgtgtagag, | (SEQ ID No. 422) |
| gtttgtagtcgtgtag, | (SEQ ID No. 423) |
| gtttcaggagtttgtag, | (SEQ ID No. 424) |
| ccagctccgaagagg, | (SEQ ID No. 425) |
| cgtcgtcgtgatcacg, | (SEQ ID No. 426) |
| ggtaaaagtactgtcc, | (SEQ ID No. 427) |
| ggctttgacaaagcc, | (SEQ ID No. 428) |
| cttgtgcagatcgtccag, | (SEQ ID No. 429) |
| cgtggttcatcttgtgc, | (SEQ ID No. 430) |
| cacgtggttcatcttgtg, | (SEQ ID No. 431) |
| cctccttgaaggtgg, | (SEQ ID No. 432) |
| cgctccactttgatgcg, | (SEQ ID No. 433) |
| ccttgtcctccagg, | (SEQ ID No. 434) |
| ggtactcgacagcc, | (SEQ ID No. 435) |
| ctgacgtgggtcatg, | (SEQ ID No. 436) |
| ccgttgctgacgtgg, | (SEQ ID No. 437) |
| catcctccgcctcc, | (SEQ ID No. 438) |
| gtttccatcctccg, | (SEQ ID No. 439) |
| ggtgtttccatcctcc, | (SEQ ID No. 440) |
| ggtgtttccatcctc, | (SEQ ID No. 441) |
| gctcagcgcctcatc, | (SEQ ID No. 442) |
| ccttcttcatcatgctgc, | (SEQ ID No. 443) |
| ccttcttcatcatgctg, | (SEQ ID No. 444) |
| ccttcttcatcatgc, | (SEQ ID No. 445) |
| gcgtccttcttcatcatgc, | (SEQ ID No. 446) |
| cctgctcactcagg, | (SEQ ID No. 447) |
| cgcaggcttgagcg, | (SEQ ID No. 448) |
| gccagcttcagcagc, | (SEQ ID No. 449) |
| ggtggtgaccagcc, | (SEQ ID No. 450) |
| cctcggcgaactcc, | (SEQ ID No. 451) |
| gcttgtgtaaatcc, | (SEQ ID No. 452) |
| ggttctgcttgtgtaaatcc, | (SEQ ID No. 453) |
| gctgctcaggttcgc, | (SEQ ID No. 454) |
| gaaggcgaccgtcg, | (SEQ ID No. 455) |
| cgaaggcgaccgtc, | (SEQ ID No. 456) |
| gcaccgtctgtggc, | (SEQ ID No. 457) |
| cgtgtccatgtcgatgg, | (SEQ ID No. 458) |
| cgtgtccatgtcgatg, | (SEQ ID No. 459) |
| gcgtgtccatgtcg, | (SEQ ID No. 460) |
| ccagcttgcgcttgc, | (SEQ ID No. 461) |
| cgctccagcttgcg, | (SEQ ID No. 462) |
| cgtgttctgactcttgag, | (SEQ ID No. 463) |
| cgtgttctgactcttg, | (SEQ ID No. 464) |
| gctgttgacgtggc, | (SEQ ID No. 465) |
| cgactcagtacgcc, | (SEQ ID No. 466) |
| gccatgcccgactc, | (SEQ ID No. 467) |
| cccttggaggtggc, | (SEQ ID No. 468) |
| ttttagtgcacat, | (SEQ ID No. 469) |
| tgttccattttagt, | (SEQ ID No. 470) |
| aaaaaaagtggaag, | (SEQ ID No. 471) |
| tacaaaaaaaagtg, | (SEQ ID No. 472) |
| atacaaaaaaaagt, | (SEQ ID No. 473) |
| catacaaaaaaaagt, | (SEQ ID No. 474) |
| catacaaaaaaaag, | (SEQ ID No. 475) |
| gaaaaaaaacatac, | (SEQ ID No. 476) |
| cagaaaaaaaacatac, | (SEQ ID No. 477) |
| cagaaaaaaaacat, | (SEQ ID No. 478) |
| ttcaatatgaatcg, | (SEQ ID No. 479) |
| tattcaatatgaatcg, | (SEQ ID No. 480) |
| tattcaatatgaatc, | (SEQ ID No. 481) |
| tattcaatatgaat, | (SEQ ID No. 482) |
| tatattcaatatgaa, | (SEQ ID No. 483) |
| ttatattcaatatga, | (SEQ ID No. 484) |
| tattatattcaatatga, | (SEQ ID No. 485) |
| ttatattcaatatg, | (SEQ ID No. 486) |
| tattatattcaatatg, | (SEQ ID No. 487) |
| attatattcaatat, | (SEQ ID No. 488) |
| tattatattcaatat, | (SEQ ID No. 489) |
| atatattatattcaatat, | (SEQ ID No. 490) |
| aaatatattatattcaatat, | (SEQ ID No. 491) |
| tattatattcaata, | (SEQ ID No. 492) |
| atatattatattcaata, | (SEQ ID No. 493) |
| caaatatattatattcaata, | (SEQ ID No. 494) |
| tatattatattcaat, | (SEQ ID No. 495) |
| aatatattatattcaat, | (SEQ ID No. 496) |
| tatattatattcaa, | (SEQ ID No. 497) |
| caaatatattatattcaa, | (SEQ ID No. 498) |
| caaatatattatattca, | (SEQ ID No. 499) |
| caaatatattatattc, | (SEQ ID No. 500) |
| cacaaatatattatattc, | (SEQ ID No. 501) |
| aaatatattatatt, | (SEQ ID No. 502) |
| caaatatattatatt, | (SEQ ID No. 503) |
| caaatatattatat, | (SEQ ID No. 504) |
| cacaaatatattatat, | (SEQ ID No. 505) |
| cacaaatatattat, | (SEQ ID No. 506) |
| tacacaaatatattat, | (SEQ ID No. 507) |
| tacacaaatatatta, | (SEQ ID No. 508) |
| taaatacacaaatatatt, | (SEQ ID No. 509) |
| aatacacaaatata, | (SEQ ID No. 510) |
| gttaaatacacaaata, | (SEQ ID No. 511) |
| tgttaaatacacaa, | (SEQ ID No. 512) |
| tttagagactaagt, | (SEQ ID No. 513) |
| ataaactctttaga, | (SEQ ID No. 514) |
| taaaataaactctttag, | (SEQ ID No. 515) |
| taaaataaactcttta, | (SEQ ID No. 516) |
| ttaaaataaactcttt, | (SEQ ID No. 517) |
| cttaaaataaactc, | (SEQ ID No. 518) |
| taaaaagaacaaaca, | (SEQ ID No. 519) |
| taaaaagaacaaac, | (SEQ ID No. 520) |
| caataaaaagaacaa, | (SEQ ID No. 521) |
| tcaataaaaagaacaa, | (SEQ ID No. 522) |
| tcaataaaaagaac, | (SEQ ID No. 523) |
| ttcaataaaaagaa, | (SEQ ID No. 524) |
| tagattcaataaaaaga, | (SEQ ID No. 525) |
| tggcgcgggcgggtagc, | (SEQ ID No. 526) |
| gggctggcgcgggcgggtag, | (SEQ ID No. 527) |
| tcgggggctggcgcgggcggg, | (SEQ ID No. 528) |
| tgggtgcctggtcgcgcgttctcggg, | (SEQ ID No. 529) |
| agggtccctgcggggccg, | (SEQ ID No. 530) |
| gggagggtccctgcgggg, | (SEQ ID No. 531) |
| gggagggtccctgcgg, | (SEQ ID No. 532) |
| tgggccgggtccgc, | (SEQ ID No. 533) |
| tcccgggggtgtag, | (SEQ ID No. 534) |
| agtactgtcccgggggtgt, | (SEQ ID No. 535) |
| gggacacgttggggggtg, | (SEQ ID No. 536) |
| gccgggggccccccggtagc, | (SEQ ID No. 537) |
| cgggcccagccgggggc, | (SEQ ID No. 538) |
| cgggcccagccggg, | (SEQ ID No. 539) |
| gggaggtggctccgggccgg, | (SEQ ID No. 540) |
| agggcggcgcgtgtggga, | (SEQ ID No. 541) |
| gggtggccaccggcgaaggg, | (SEQ ID No. 542) |
| aggggcaggggacgt, | (SEQ ID No. 543) |
| taaaggggcaggggacgt, | (SEQ ID No. 544) |
| agggggtgtccgtaaagggg, | (SEQ ID No. 545) |
| ggggacgcgaacgtgccgccg, | (SEQ ID No. 546) |
| cggggaacaagcggcccgggg, | (SEQ ID No. 547) |
| ggccgtcgggggcg, | (SEQ ID No. 548) |
| gcggccgtcgggggc, | (SEQ ID No. 549) |
| aggggggtaggaggcggg, | (SEQ ID No. 550) |
| gcgctgggggcgcc, | (SEQ ID No. 551) |
| ggccgtcggggggt, | (SEQ ID No. 552) |
| ggggaggccagcttc, | (SEQ ID No. 553) |
| ggccgccaccttgggg, | (SEQ ID No. 554) |
| gcggccgccgccgggg, | (SEQ ID No. 555) |
| gggcgcggccgccgccgggg, | (SEQ ID No. 556) |
| ggggtggcggcggcgg, | (SEQ ID No. 557) |
| gggggtggcggcggc, | (SEQ ID No. 558) |
| tggggcagcagctggcag, | (SEQ ID No. 559) |
| cggggcgcccacgacacc, | (SEQ ID No. 560) |
| cggggcgcccacgacac, | (SEQ ID No. 561) |
| gggccgcaccctctccaagtccgggg, | (SEQ ID No. 562) |
| gcagcagtcagtgg, | (SEQ ID No. 563) |
| ccattgtctagcacgg, | (SEQ ID No. 564) |
| ggtctccattgtctagc, | (SEQ ID No. 565) |
| ggtggtattgttcagc, | (SEQ ID No. 566) |
| gctggatcaagaccc, | (SEQ ID No. 567) |
| ccacaaaatcgtgtcc, | (SEQ ID No. 568) |
| ccttccacaaaatcgtgtcc, | (SEQ ID No. 569) |
| ggttgttcttgtgg, | (SEQ ID No. 570) |
| cctcttggttgtgc, | (SEQ ID No. 571) |
| ccagagtctcaaacacttgg, | (SEQ ID No. 572) |
| ggtaacctgtgatctcttcc, | (SEQ ID No. 573) |
| cctgcagtactcgg, | (SEQ ID No. 574) |
| ggcattcacatactcc, | (SEQ ID No. 575) |
| gcaaacagtgcctggc, | (SEQ ID No. 576) |
| cgcatcgtgtacttccg, | (SEQ ID No. 577) |
| gcacgttccgagcg, | (SEQ ID No. 578) |
| ggtaccagatactcc, | (SEQ ID No. 579) |
| ccagtggagacctgg, | (SEQ ID No. 580) |
| cctgaggacacatcagg, | (SEQ ID No. 581) |
| cctcacttggttgtgagc, | (SEQ ID No. 582) |
| ggaagatgtccttcc, | (SEQ ID No. 583) |
| gcacactgctcatggc, | (SEQ ID No. 584) |
| gctgtcacctcttgg, | (SEQ ID No. 585) |
| cctctgctgtcacc, | (SEQ ID No. 586) |
| ccacacatcactctgg, | (SEQ ID No. 587) |
| cctcctcttcagagg, | (SEQ ID No. 588) |
| ccttctggttcacactgg, | (SEQ ID No. 589) |
| catggtgctcactgcg, | (SEQ ID No. 590) |
| cttggttgtgagcg, | (SEQ ID No. 591) |
| ggacaggcagtcac, | (SEQ ID No. 592) |
| gtcacctcttggttgtgc, | (SEQ ID No. 593) |
| ccagagtctcaaacac, | (SEQ ID No. 594) |
| cacatactccctgg, | (SEQ ID No. 595) |
| gaccagcacgttccg, | (SEQ ID No. 596) |
| gttggtgtctatcagtg, | (SEQ ID No. 597) |
| ccctggtagaggtg, | (SEQ ID No. 598) |
| ctcaaacacttggagc, | (SEQ ID No. 599) |
| cacacatcactctggtgg, | (SEQ ID No. 600) |
| gcacagacagtgcgc, | (SEQ ID No. 601) |
| catggcagcagtcag, | (SEQ ID No. 602) |
| ctgctcatggcagcag, | (SEQ ID No. 603) |
| catctggaaacttccagatg, | (SEQ ID No. 604) |
| ctggaaacttccag, | (SEQ ID No. 605) |
| cataactccacacatcactc, | (SEQ ID No. 606) |
| caccataactccacacatc, | (SEQ ID No. 607) |
| ctggtgggtgaacc, | (SEQ ID No. 608) |
| cggattacttgcagg, | (SEQ ID No. 609) |
| cgctaggtgtcagcg, | (SEQ ID No. 610) |
| gccatcacgtatgc, | (SEQ ID No. 611) |
| gcatacaccagttcagc, | (SEQ ID No. 612) |
| ccatcaaatacatcgg, | (SEQ ID No. 613) |
| ccagcagaagtcagg, | (SEQ ID No. 614) |
| gcttcatgtctgtgc, | (SEQ ID No. 615) |
| ggtgagttccaggtttcc, | (SEQ ID No. 616) |
| ccacaaaatcgtgtcctgg, | (SEQ ID No. 617) |
| cccttacacatcgg, | (SEQ ID No. 618) |
| gcagctcacagatgc, | (SEQ ID No. 619) |
| gcactggtaactgc, | (SEQ ID No. 620) |
| cctggatattggcactgg, | (SEQ ID No. 621) |
| ccagcaaactcctgg, | (SEQ ID No. 622) |
| gcagaaatgccaggc, | (SEQ ID No. 623) |
| ccattgtgcagaattcg, | (SEQ ID No. 624) |
| ccctgcagtactcgg, | (SEQ ID No. 625) |
| ggcattcacatactccc, | (SEQ ID No. 626) |
| ggtcaggtttcacacc, | (SEQ ID No. 627) |
| ccaggtccacacagg,. | (SEQ ID No. 628) |
| ccttgtcatccagg, | (SEQ ID No. 629) |
| ggatcccaaagacc, | (SEQ ID No. 630) |
| cctcaacactttgatgg, | (SEQ ID No. 631) |
| gctgtgtcaccagc, | (SEQ ID No. 632) |
| ggtctaagaggcagcc, | (SEQ ID No. 633) |
| ggcaatctgcatacacc, | (SEQ ID No. 634) |
| cctgtgtacgagcc, | (SEQ ID No. 635) |
| ccatccacttgatgg, | (SEQ ID No. 636) |
| cccacacagtcacacc, | (SEQ ID No. 637) |
| ccatcgtaaggtttgg, | (SEQ ID No. 638) |
| ccttttccagcagg, | (SEQ ID No. 639) |
| ggagaattcagacacc, | (SEQ ID No. 640) |
| ccaagtcctcattctgg, | (SEQ ID No. 641) |
| ccatcagtctcagagg, | (SEQ ID No. 642) |
| cctttgaaggtgctgg, | (SEQ ID No. 643) |
| ggcatggcaggttcc, | (SEQ ID No. 644) |
| cctggcatggcagg, | (SEQ ID No. 645) |
| agatgtataggtaa, | (SEQ ID No. 646) |
| attttcacattctc, | (SEQ ID No. 647) |
| aattttcacattctc, | (SEQ ID No. 648) |
| aattttcacattct, | (SEQ ID No. 649) |
| gaattttcacattc, | (SEQ ID No. 650) |
| ggaattttcacatt, | (SEQ ID No. 651) |
| agatttctttgttg, | (SEQ ID No. 652) |
| aagatttctttgttg, | (SEQ ID No. 653) |
| aagatttctttgtt, | (SEQ ID No. 654) |
| taagatttctttgtt, | (SEQ ID No. 655) |
| ctaagatttctttgtt, | (SEQ ID No. 656) |
| taagatttctttgt, | (SEQ ID No. 657) |
| ctaagatttctttgt, | (SEQ ID No. 658) |
| ctaagatttctttg, | (SEQ ID No. 659) |
| tctaagatttcttt, | (SEQ ID No. 660) |
| gtctaagatttcttt, | (SEQ ID No. 661) |
| gtctaagatttctt, | (SEQ ID No. 662) |
| ttcgtctaagattt, | (SEQ ID No. 663) |
| attttgacatggtt, | (SEQ ID No. 664) |
| aattttgacatggtt, | (SEQ ID No. 665) |
| aattttgacatggt, | (SEQ ID No. 666) |
| taattttgacatggt, | (SEQ ID No. 667) |
| taattttgacatgg, | (SEQ ID No. 668) |
| gtaattttgacatg, | (SEQ ID No. 669) |
| tgtaattttgacatg, | (SEQ ID No. 670) |
| tgtaattttgacat, | (SEQ ID No. 671) |
| tctgtaattttgacat, | (SEQ ID No. 672) |
| ctgtaattttgaca, | (SEQ ID No. 673) |
| tctgtaattttgaca, | (SEQ ID No. 674) |
| tctgtaattttgac, | (SEQ ID No. 675) |
| gtctgtaattttga, | (SEQ ID No. 676) |
| aagtctgtaattttga, | (SEQ ID No. 677) |
| agtctgtaattttg, | (SEQ ID No. 678) |
| aagtctgtaattttg, | (SEQ ID No. 679) |
| aagtctgtaatttt, | (SEQ ID No. 680) |
| gaagtctgtaatttt, | (SEQ ID No. 681) |
| gaagtctgtaattt, | (SEQ ID No. 682) |
| atgtagacatcaat, | (SEQ ID No. 683) |
| atcatccaacattt, | (SEQ ID No. 684) |
| aatcatccaacattt, | (SEQ ID No. 685) |
| aatcatccaacatt, | (SEQ ID No. 686) |
| accatcaaatacat, | (SEQ ID No. 687) |
| aaaaacgtctttga, | (SEQ ID No. 688) |
| ttttgttcttagaca, | (SEQ ID No. 689) |
| ttttgttcttagac, | (SEQ ID No. 690) |
| taaacagaaaagca, | (SEQ ID No. 691) |
| actaaacagaaaag, | (SEQ ID No. 692) |
| aaactaaacagaaaag, | (SEQ ID No. 693) |
| aactaaacagaaaa, | (SEQ ID No. 694) |
| aaactaaacagaaaa, | (SEQ ID No. 695) |
| aaactaaacagaaa, | (SEQ ID No. 696) |
| taaaaactaaacagaaa, | (SEQ ID No. 697) |
| aaaactaaacagaa, | (SEQ ID No. 698) |
| gtaaaaactaaacagaa, | (SEQ ID No. 699) |
| aaaaactaaacaga, | (SEQ ID No. 700) |
| taaaaactaaacaga, | (SEQ ID No. 701) |
| taaaaactaaacag, | (SEQ ID No. 702) |
| gtaaaaactaaaca, | (SEQ ID No. 703) |
| aaaaagtaaaaactaaaca, | (SEQ ID No. 704) |
| agtaaaaactaaac, | (SEQ ID No. 705) |
| aaaaaaagtaaaaactaaac, | (SEQ ID No. 706) |
| aagtaaaaactaaa, | (SEQ ID No. 707) |
| aaaaaaagtaaaaactaaa, | (SEQ ID No. 708) |
| aaagtaaaaactaa, | (SEQ ID No. 709) |
| aaaagtaaaaacta, | (SEQ ID No. 710) |
| aaaaaaagtaaaaacta, | (SEQ ID No. 711) |
| aaaaagtaaaaact, | (SEQ ID No. 712) |
| aaaaaaagtaaaaact, | (SEQ ID No. 713) |
| aaaaaaagtaaaaac, | (SEQ ID No. 714) |
| caaaaaaagtaaaaac, | (SEQ ID No. 715) |
| aaaaaaagtaaaaa, | (SEQ ID No. 716) |
| caaaaaaagtaaaa, | (SEQ ID No. 717) |
| aacaaaacaaaaaaagtaaa, | (SEQ ID No. 718) |
| aaacaaaaaaagta, | (SEQ ID No. 719) |
| caaaacaaaaaaagta, | (SEQ ID No. 720) |
| caaaacaaaaaaagt, | (SEQ ID No. 721) |
| caaaacaaaaaaag, | (SEQ ID No. 722) |
| ctttaaaaaaacaaaac, | (SEQ ID No. 723) |
| tctttaaaaaaacaaa, | (SEQ ID No. 724) |
| gtctttaaaaaaacaaa, | (SEQ ID No. 725) |
| gtctttaaaaaaaca, | (SEQ ID No. 726) |
| gtctttaaaaaaac, | (SEQ ID No. 727) |
| tttatttcgtcttt, | (SEQ ID No. 728) |
| tctttatttcgtct, | (SEQ ID No. 729) |
| tatttgcaaatgga, | (SEQ ID No. 730) |
| tatatttgcaaatgg, | (SEQ ID No. 731) |
| tatatttgcaaatg, | (SEQ ID No. 732) |
| caaaatatatttgcaaatg, | (SEQ ID No. 733) |
| caaaatatatttgcaaat, | (SEQ ID No. 734) |
| caaaatatatttgca, | (SEQ ID No. 735) |
| caaaatatatttgc, | (SEQ ID No. 736) |
| ttccaaaatatatttg, | (SEQ ID No. 737) |
| ttttccaaaatatattt, | (SEQ ID No. 738) |
| gttttccaaaatatatt, | (SEQ ID No. 739) |
| gttttccaaaatat, | (SEQ ID No. 740) |
| ggttaggcaaagcc, | (SEQ ID No. 741) |
| ccgagaacatcatcgtgg, | (SEQ ID No. 742) |
| ccgagaacatcatcgtg, | (SEQ ID No. 743) |
| ccgagaacatcatcg, | (SEQ ID No. 744) |
| cgtagtctgcgttgaagc, | (SEQ ID No. 745) |
| ccatgctggagaagg, | (SEQ ID No. 746) |
| ccgtgcagaagtcc, | (SEQ ID No. 747) |
| ggaatgaagttggc, | (SEQ ID No. 748) |
| tgaccgtgggaatg, | (SEQ ID No. 749) |
| tggcagtgaccgtg, | (SEQ ID No. 750) |
| agatggcagtgacc, | (SEQ ID No. 751) |
| cgagatggcagtgacc, | (SEQ ID No. 752) |
| ccagccactgcagg, | (SEQ ID No. 753) |
| gcaccagccactgc, | (SEQ ID No. 754) |
| ccctggagtaagcc, | (SEQ ID No. 755) |
| ggagataactgttccacc, | (SEQ ID No. 756) |
| ggagataactgttcc, | (SEQ ID No. 757) |
| cttctagttggtctg, | (SEQ ID No. 758) |
| catcttctagttgg, | (SEQ ID No. 759) |
| tctcatcttctagttgg, | (SEQ ID No. 760) |
| ctgcaaagcagacttctc, | (SEQ ID No. 761) |
| ccttcagcaggttgg, | (SEQ ID No. 762) |
| cccaggtcatcagg, | (SEQ ID No. 763) |
| ccagtcagatcaagg, | (SEQ ID No. 764) |
| ggtgaaggcctcctc, | (SEQ ID No. 765) |
| cagggtgaaggcctc, | (SEQ ID No. 766) |
| cctggatgatgctgg, | (SEQ ID No. 767) |
| ccactgtgcagagg, | (SEQ ID No. 768) |
| ggagtacaggtgacc, | (SEQ ID No. 769) |
| gctcattgctgctgc, | (SEQ ID No. 770) |
| ggaaggctcattgctgc, | (SEQ ID No. 771) |
| ttttctcttcttct, | (SEQ ID No. 772) |
| atcttattcctttc, | (SEQ ID No. 773) |
| catcttattccttt, | (SEQ ID No. 774) |
| tagtttttccttct, | (SEQ ID No. 775) |
| tctagtttttcctt, | (SEQ ID No. 776) |
| aactctagtttttc, | (SEQ ID No. 777) |
| gaactctagttttt, | (SEQ ID No. 778) |
| tgaactctagttttt, | (SEQ ID No. 779) |
| atgaactctagttttt, | (SEQ ID No. 780) |
| tgaactctagtttt, | (SEQ ID No. 781) |
| atgaactctagtttt, | (SEQ ID No. 782) |
| atgaactctagttt, | (SEQ ID No. 783) |
| gcacacagtagtgc, | (SEQ ID No. 784) |
| gcaggatcagaaaagc, | (SEQ ID No. 785) |
| gcaggtagacaggc, | (SEQ ID No. 786) |
| gcttgctcaggatctgc, | (SEQ ID No. 787) |
| gcaagtccctggtgc, | (SEQ ID No. 788) |
| cctggagcaagtcc, | (SEQ ID No. 789) |
| cgtagtactcttcgtcg, | (SEQ ID No. 790) |
| cgtagtactcttcg, | (SEQ ID No. 791) |
| gtaaacctccttgg, | (SEQ ID No. 792) |
| gtctattttgtaaacctcc, | (SEQ ID No. 793) |
| gcatgtctattttgtaaacc, | (SEQ ID No. 794) |
| ggcatcaaggtaccc, | (SEQ ID No. 795) |
| ggcatcaaggtacc, | (SEQ ID No. 796) |
| gctttcaccaaattggaagc, | (SEQ ID No. 797) |
| gagaatctgatatagctc, | (SEQ ID No. 798) |
| ggagatgttaaatctttgg, | (SEQ ID No. 799) |
| gctgtcgatgtagc, | (SEQ ID No. 800) |
| ccaggttcctgtctttatgg, | (SEQ ID No. 801) |
| cagcagggacagtg, | (SEQ ID No. 802) |
| cttgcttctagttcttcac, | (SEQ ID No. 803) |
| gccatcaatacctgc, | (SEQ ID No. 804) |
| ggtgccatcaatacc, | (SEQ ID No. 805) |
| ccactggtatatgtgg, | (SEQ ID No. 806) |
| ggactttatagttttctg, | (SEQ ID No. 807) |
| ctcaagtctgtaggag, | (SEQ ID No. 808) |
| ggtctgttgtgactc, | (SEQ ID No. 809) |
| caattatcctgcacatttc, | (SEQ ID No. 810) |
| gcagcaattatcctgc, | (SEQ ID No. 811) |
| ggcagcaattatcc, | (SEQ ID No. 812) |
| ggttcgtgtatccatttcc, | (SEQ ID No. 813) |
| gcacagaagttggc, | (SEQ ID No. 814) |
| ccagcacagaagttgg, | (SEQ ID No. 815) |
| gtgctgagtgtctg, | (SEQ ID No. 816) |
| cctgctgtgctgagtg, | (SEQ ID No. 817) |
| gctcaggaccctgc, | (SEQ ID No. 818) |
| gcagcaaggagaagc, | (SEQ ID No. 819) |
| ccaatgtagtagagaatgg, | (SEQ ID No. 820) |
| gctgcatttgcaag, | (SEQ ID No. 821) |
| aaaaaagaaatcaa, | (SEQ ID No. 822) |
| aaaaaaagaaatcaa, | (SEQ ID No. 823) |
| aaaaaaaagaaatcaa, | (SEQ ID No. 824) |
| taaaaaaaagaaatcaa, | (SEQ ID No. 825) |
| ataaaaaaaagaaatcaa, | (SEQ ID No. 826) |
| aataaaaaaaagaaatcaa, | (SEQ ID No. 827) |
| gaataaaaaaaagaaat, | (SEQ ID No. 828) |
| agaataaaaaaaagaaat, | (SEQ ID No. 829) |
| cagaataaaaaaaa, | (SEQ ID No. 830) |
| tcagaataaaaaaa, | (SEQ ID No. 831) |
| ttgtttttaaaagt, | (SEQ ID No. 832) |
| agttgtttttaaaa, | (SEQ ID No. 833) |
| aagttgtttttaaaa, | (SEQ ID No. 834) |
| aaagttgtttttaaaa, | (SEQ ID No. 835) |
| aaaagttgtttttaaaa, | (SEQ ID No. 836) |
| aaaaagttgtttttaaaa, | (SEQ ID No. 837) |
| aaaaaagttgtttttaaaa, | (SEQ ID No. 838) |
| aaaaaaagttgtttttaaaa, | (SEQ ID No. 839) |
| aaaaaaaagttgtttttaaa, | (SEQ ID No. 840) |
| tttttaaaaaagtg, | (SEQ ID No. 841) |
| ttttttaaaaaagtg, | (SEQ ID No. 842) |
| attttttaaaaaagtg, | (SEQ ID No. 843) |
| cattttttaaaaaagt, | (SEQ ID No. 844) |
| gcattttttaaaaaa, | (SEQ ID No. 845) |
| tgcattttttaaaaaa, | (SEQ ID No. 846) |
| agcttattttaaat, | (SEQ ID No. 847) |
| aagcttattttaaat, | (SEQ ID No. 848) |
| taagcttattttaaat, | (SEQ ID No. 849) |
| tgtaattattagat, | (SEQ ID No. 850) |
| atgtaattattagat, | (SEQ ID No. 851) |
| tgatgtaattatta, | (SEQ ID No. 852) |
| atgatgtaattatta, | (SEQ ID No. 853) |
| atggtattatataa, | (SEQ ID No. 854) |
| tatggtattatataa, | (SEQ ID No. 855) |
| ttatggtattatataa, | (SEQ ID No. 856) |
| tttatggtattatataa, | (SEQ ID No. 857) |
| atttatggtattatataa, | (SEQ ID No. 858) |
| aatcatattagaaa, | (SEQ ID No. 859) |
| ttacaatcatatta, | (SEQ ID No. 860) |
| tttacaatcatatta, | (SEQ ID No. 861) |
| ggcatgacgcctttcc, | (SEQ ID No. 862) |
| gcatgacgcctttc, | (SEQ ID No. 863) |
| gcctgacgagaggc, | (SEQ ID No. 864) |
| ctcaagcctgacgag, | (SEQ ID No. 865) |
| ccacagttcctttttc, | (SEQ ID No. 866) |
| gctgcaataaagatacag, | (SEQ ID No. 867) |
| gctgcaataaagatac, | (SEQ ID No. 868) |
| ggacactgatttctatg, | (SEQ ID No. 869) |
| gcattatcaactttgg, | (SEQ ID No. 870) |
| acttttagcaccaatg, | (SEQ ID No. 871) |
| ccaagaaacttttagcacc, | (SEQ ID No. 872) |
| ccagatcatcttcc, | (SEQ ID No. 873) |
| agtcaaggacacatag, | (SEQ ID No. 874) |
| tctttgagcaacatgg, | (SEQ ID No. 875) |
| gggtataacagctg, | (SEQ ID No. 876) |
| gaggtgaaccattaatgg, | (SEQ ID No. 877) |
| tcttcgtatcgtttag, | (SEQ ID No. 878) |
| tgttggatagtgttc, | (SEQ ID No. 879) |
| gttgatcacttgctg, | (SEQ ID No. 880) |
| ggattccattactcg, | (SEQ ID No. 881) |
| gacatatgaaaaatgttgtc, | (SEQ ID No. 882) |
| gccaataaagacatatg, | (SEQ ID No. 883) |
| ccagaatcaagattctg, | (SEQ ID No. 884) |
| ctgttccagaatcaag, | (SEQ ID No. 885) |
| gacaaatctgttccagaatc, | (SEQ ID No. 886) |
| ggaaagacaaatctgttcc, | (SEQ ID No. 887) |
| gattaagaggacaagc, | (SEQ ID No. 888) |
| ggaagattaagagg, | (SEQ ID No. 889) |
| gcagtgtgattattctgg, | (SEQ ID No. 890) |
| ggagaaagatacatatctg, | (SEQ ID No. 891) |
| ggagatcttacagg, | (SEQ ID No. 892) |
| gcatttgcagtagaatttac, | (SEQ ID No. 893) |
| cagtgaaagagagg, | (SEQ ID No. 894) |
| gctagccgatacac, | (SEQ ID No. 895) |
| ggaagatccttgtatgc, | (SEQ ID No. 896) |
| gcatgaggaagatcc, | (SEQ ID No. 897) |
| ggagtcatttttgttg, | (SEQ ID No. 898) |
| ccaattgatactaagattc, | (SEQ ID No. 899) |
| tcttttgagcacacg, | (SEQ ID No. 900) |
| ccttcagcacttcttttg, | (SEQ ID No. 901) |
| ggttgcttccttcagc, | (SEQ ID No. 902) |
| cagtggtttaggag, | (SEQ ID No. 903) |
| cctgagatcctcatttc, | (SEQ ID No. 904) |
| ccaaggtcctgagatcc, | (SEQ ID No. 905) |
| ggtgtacacagtgtcc, | (SEQ ID No. 906) |
| tatctttaatttct, | (SEQ ID No. 907) |
| tcttttgaatataa, | (SEQ ID No. 908) |
| ttcttttgaatataa, | (SEQ ID No. 909) |
| tttcttttgaatataa, | (SEQ ID No. 910) |
| ttttcttttgaatataa, | (SEQ ID No. 911) |
| tttttcttttgaatataa, | (SEQ ID No. 912) |
| atttctatgttttt, | (SEQ ID No. 913) |
| ttaaagaatttatg, | (SEQ ID No. 914) |
| gttaaagaatttat, | (SEQ ID No. 915) |
| agttaaagaatttat, | (SEQ ID No. 916) |
| aagttaaagaatttat, | (SEQ ID No. 917) |
| taagttaaagaatttat, | (SEQ ID No. 918) |
| tttagtaagttaaa, | (SEQ ID No. 919) |
| ttttagtaagttaaa, | (SEQ ID No. 920) |
| atttcttttagtaa, | (SEQ ID No. 921) |
| aatttcttttagtaa, | (SEQ ID No. 922) |
| atcaatttctttta, | (SEQ ID No. 923) |
| tatcaatttctttta, | (SEQ ID No. 924) |
| aatatataagttca, | (SEQ ID No. 925) |
| aaatatataagttca, | (SEQ ID No. 926) |
| caaatatataagtt, | (SEQ ID No. 927) |
| tcaaatatataagtt, | (SEQ ID No. 928) |
| tgtcaaatatataa, | (SEQ ID No. 929) |
| aatttatttcagta, | (SEQ ID No. 930) |
| aataaaaatgtgat, | (SEQ ID No. 931) |
| taataaaaatgtgat, | (SEQ ID No. 932) |
| tagctaataaaaat, | (SEQ ID No. 933) |
| ttagctaataaaaat, | (SEQ ID No. 934) |
| tttagctaataaaaat, | (SEQ ID No. 935) |
| aataaaatagtcaa, | (SEQ ID No. 936) |
| taataaaatagtcaa, | (SEQ ID No. 937) |
| ttaataaaatagtcaa, | (SEQ ID No. 938) |
| tttaataaaatagtcaa, | (SEQ ID No. 939) |
| gtttaataaaatagt, | (SEQ ID No. 940) |
| agtttaataaaatagt, | (SEQ ID No. 941) |
| gagtttaataaaata, | (SEQ ID No. 942) |
| agagtttaataaaata, | (SEQ ID No. 943) |
| aataattcttgtat, | (SEQ ID No. 944) |
| tatattacattcat, | (SEQ ID No. 945) |
| atctatattacatt, | (SEQ ID No. 946) |
| ataaacatttttca, | (SEQ ID No. 947) |
| aataaacatttttca, | (SEQ ID No. 948) |
| aaataaacatttttca, | (SEQ ID No. 949) |
| gaaataaacattttt, | (SEQ ID No. 950) |
| tgaaataaacattttt, | (SEQ ID No. 951) |
| ttgaaataaacattttt, | (SEQ ID No. 952) |
| tttgaaataaacattttt, | (SEQ ID No. 953) |
| ttttgaaataaacattttt, | (SEQ ID No. 954) |
| tttttgaaataaacattttt, | (SEQ ID No. 955) |
| atttttgaaataaacatttt, | (SEQ ID No. 956) |
| aatttttgaaataaacatt, | (SEQ ID No. 957) |
| aaatttttgaaataaacatt, | (SEQ ID No. 958) |
| aaaatttttgaaataaacat, | (SEQ ID No. 959) |
| taaaatttttgaaataaaca, | (SEQ ID No. 960) |
| ataaaatttttgaaataaac, | (SEQ ID No. 961) |
| tataaaatttttgaaataaa, | (SEQ ID No. 962) |
| gtataaaatttttgaaat, | (SEQ ID No. 963) |
| ggtataaaattttt, | (SEQ ID No. 964) |
| aggtataaaattttt, | (SEQ ID No. 965) |
| aaggtataaaattttt, | (SEQ ID No. 966) |
| aaaggtataaaattttt, | (SEQ ID No. 967) |
| aaaaggtataaaattttt, | (SEQ ID No. 968) |
| taaaaggtataaaattttt, | (SEQ ID No. 969) |
| ataaaaggtataaaattttt, | (SEQ ID No. 970) |
| tttagaaagatttt, | (SEQ ID No. 971) |
| aagataaatttctt, | (SEQ ID No. 972) |
| taagataaatttctt, | (SEQ ID No. 973) |
| ttaagataaatttctt, | (SEQ ID No. 974) |
| tttaagataaatttctt, | (SEQ ID No. 975) |
| ttttaagataaatttctt, | (SEQ ID No. 976) |
| tttttaagataaatttctt, | (SEQ ID No. 977) |
| atttttaagataaatttctt, | (SEQ ID No. 978) |
| tatttttaagataaatttct, | (SEQ ID No. 979) |
| ttatttttaagataaatt, | (SEQ ID No. 980) |
| tttatttttaagataaatt, | (SEQ ID No. 981) |
| ctttatttttaagataaat, | (SEQ ID No. 982) |
| tctttatttttaagataaat, | (SEQ ID No. 983) |
| atctttatttttaagataaa, | (SEQ ID No. 984) |
| atctttatttttaa, | (SEQ ID No. 985) |
| gatctttatttttaa, | (SEQ ID No. 986) |
| agatctttatttttaa, | (SEQ ID No. 987) |
| tagatctttatttttaa, | (SEQ ID No. 988) |
| aatcatcattaatt, | (SEQ ID No. 989) |
| aaatcatcattaatt, | (SEQ ID No. 990) |
| aaaatcatcattaatt, | (SEQ ID No. 991) |
| taaaatcatcattaatt, | (SEQ ID No. 992) |
| ttaaaatcatcattaatt, | (SEQ ID No. 993) |
| tttaaaatcatcattaatt, | (SEQ ID No. 994) |
| atttaaaatcatcattaatt, | (SEQ ID No. 995) |
| aatttaaaatcatcattaa, | (SEQ ID No. 996) |
| gaatttaaaatcat, | (SEQ ID No. 997) |
| tgaatttaaaatcat, | (SEQ ID No. 998) |
| ttaaaataggaaat, | (SEQ ID No. 999) |
| aatttctctttaaa, | (SEQ ID No. 1000) |
| aaatttctctttaaa, | (SEQ ID No. 1001) |
| taaaattttgaatg, | (SEQ ID No. 1002) |
| ctaaaattttgaat, | (SEQ ID No. 1003) |
| tttgctaaaatttt, | (SEQ ID No. 1004) |
| atatgaaaaatgtt, | (SEQ ID No. 1005) |
| ttttaaattaagca, | (SEQ ID No. 1006) |
| ttgtaaaaatcaaa, | (SEQ ID No. 1007) |
| tttgtaaaaatcaaa, | (SEQ ID No. 1008) |
| tttgataaaacttt, | (SEQ ID No. 1009) |
| atgttttatcattt, | (SEQ ID No. 1010) |
| aatgttttatcattt, | (SEQ ID No. 1011) |
| aaatgttttatcattt, | (SEQ ID No. 1012) |
| taaatgttttatcattt, | (SEQ ID No. 1013) |
| tctaaatgttttat, | (SEQ ID No. 1014) |
| ttctaaatgttttat, | (SEQ ID No. 1015) |
| taagatcaaataaa, | (SEQ ID No. 1016) |
| ataagatcaaataaa, | (SEQ ID No. 1017) |
| aataagatcaaataaa, | (SEQ ID No. 1018) |
| taataagatcaaataaa, | (SEQ ID No. 1019) |
| ttaataagatcaaataaa, | (SEQ ID No. 1020) |
| tttaataagatcaaataaa, | (SEQ ID No. 1021) |
| ttgtttaataagat, | (SEQ ID No. 1022) |
| attgtttaataagat, | (SEQ ID No. 1023) |
| tgattgtttaataa, | (SEQ ID No. 1024) |
| ttgattgtttaataa, | (SEQ ID No. 1025) |
| tttgattgtttaataa, | (SEQ ID No. 1026) |
| ttttataaaacagt, | (SEQ ID No. 1027) |
| tttttataaaacagt, | (SEQ ID No. 1028) |
| ttttttataaaacagt, | (SEQ ID No. 1029) |
| cttttttataaaaca, | (SEQ ID No. 1030) |
| acttttttataaaaca, | (SEQ ID No. 1031) |
| cacttttttataaaa, | (SEQ ID No. 1032) |
| acacttttttataaaa, | (SEQ ID No. 1033) |
| tacacttttttataaaa, | (SEQ ID No. 1034) |
| atacacttttttataaaa, | (SEQ ID No. 1035) |
| attttgaatttaag, | (SEQ ID No. 1036) |
| gattttgaatttaa, | (SEQ ID No. 1037) |
| tgattttgaatttaa, | (SEQ ID No. 1038) |
| atgattttgaatttaa, | (SEQ ID No. 1039) |
| aatgattttgaatttaa, | (SEQ ID No. 1040) |
| ataatagaatcata, | (SEQ ID No. 1041) |
| tataatagaatcata, | (SEQ ID No. 1042) |
| tataatagaatcat, | (SEQ ID No. 1043) |
| tactataatagaat, | (SEQ ID No. 1044) |
| atactataatagaat, | (SEQ ID No. 1045) |
| aatactataatagaat, | (SEQ ID No. 1046) |
| agaatactataata, | (SEQ ID No. 1047) |
| tagaatactataata, | (SEQ ID No. 1048) |
| atagaatactataata, | (SEQ ID No. 1049) |
| tatagaatactataata, | (SEQ ID No. 1050) |
| ttatagaatactataata, | (SEQ ID No. 1051) |
| aatatttgttttca, | (SEQ ID No. 1052) |
| aaatatttgttttca, | (SEQ ID No. 1053) |
| aaaatatttgttttca, | (SEQ ID No. 1054) |
| caaaatatttgtttt, | (SEQ ID No. 1055) |
| aaattttatatgga, | (SEQ ID No. 1056) |
| tgaaattttatatg, | (SEQ ID No. 1057) |
| ctgaaattttatat, | (SEQ ID No. 1058) |
| tctgaaattttatat, | (SEQ ID No. 1059) |
| ttctgaaattttatat, | (SEQ ID No. 1060) |
| atctgatttatttt, | (SEQ ID No. 1061) |
| aagatattaaatgt, | (SEQ ID No. 1062) |
| tgaagatattaaat, | (SEQ ID No. 1063) |
| ataaataacaatga, | (SEQ ID No. 1064) |
| tataaataacaatga, | (SEQ ID No. 1065) |
| gtataaataacaat, | (SEQ ID No. 1066) |
| tgtataaataacaat, | (SEQ ID No. 1067) |
| ttgtataaataacaat, | (SEQ ID No. 1068) |
| tcttgtataaataa, | (SEQ ID No. 1069) |
| atcttgtataaataa, | (SEQ ID No. 1070) |
| aatcttgtataaataa, | (SEQ ID No. 1071) |
| acaactttttaaat, | (SEQ ID No. 1072) |
| tacaactttttaaat, | (SEQ ID No. 1073) |
| tacaactttttaaa, | (SEQ ID No. 1074) |
| cggggggttttgggcggcatg, | (SEQ ID No. 1075) |
| ttttcggggggttttgggcggca, | (SEQ ID No. 1076) |
| tcggggggttttgggcggc, | (SEQ ID No. 1077) |
| ggtggcggccgtttttcggggggt, | (SEQ ID No. 1078) |
| ccgggggttccgcggcggcagcg, | (SEQ ID No. 1079) |
| cgggggttccgcggcgg, | (SEQ ID No. 1080) |
| ggcggcggtgccgggggttccgc, | (SEQ ID No. 1081) |
| ggagggggcggcggcggcggtg, | (SEQ ID No. 1082) |
| gggggcggcggcggcgg, | (SEQ ID No. 1083) |
| ggggcggcggcggcg, | (SEQ ID No. 1084) |
| agggggcctggtggaag, | (SEQ ID No. 1085) |
| tagggggcctggtg, | (SEQ ID No. 1086) |
| gtagggggcctggt, | (SEQ ID No. 1087) |
| gaggtattggtgacaaggtagggggc, | (SEQ ID No. 1088) |
| tcttcaggggtgaaatatagatgttc, | (SEQ ID No. 1089) |
| ggactcttcaggggtg, | (SEQ ID No. 1090) |
| tcggactatactgc, | (SEQ ID No. 1091) |
| cagttcggactatact, | (SEQ ID No. 1092) |
| aagcctaagacgca, | (SEQ ID No. 1093) |
| gcccaagttcaaca, | (SEQ ID No. 1094) |
| tgaaaagtcgcggt, | (SEQ ID No. 1095) |
| ggttaattaagatgcctc, | (SEQ ID No. 1096) |
| tctctaagagcgca, | (SEQ ID No. 1097) |
| acgtgaggttagtttg, | (SEQ ID No. 1098) |
| cacgtgaggttagt, | (SEQ ID No. 1099) |
| catagaacagtccg, | (SEQ ID No. 1100) |
| cagtcatagaacagtc, | (SEQ ID No. 1101) |
| ctttgcagtcatagaaca, | (SEQ ID No. 1102) |
| tgcagtcatagaac, | (SEQ ID No. 1103) |
| ggtcgtttccatct, | (SEQ ID No. 1104) |
| catagaaggtcgtttc, | (SEQ ID No. 1105) |
| cgtcatagaaggtc, | (SEQ ID No. 1106) |
| catcgtcatagaagg, | (SEQ ID No. 1107) |
| ggacgggaggaacgaggcgttgag, | (SEQ ID No. 1108) |
| tagccataaggtcc, | (SEQ ID No. 1109) |
| ggttactgtagcca, | (SEQ ID No. 1110) |
| ggttactgtagcca, | (SEQ ID No. 1111) |
| agttcttggcgcggaggt, | (SEQ ID No. 1112) |
| aggtgaggaggtccgagt, | (SEQ ID No. 1113) |
| tggactggattatcag, | (SEQ ID No. 1114) |
| gtggtggtgatgtgcccg, | (SEQ ID No. 1115) |
| tgtcacgttcttgg, | (SEQ ID No. 1116) |
| ctcatctgtcacgt, | (SEQ ID No. 1117) |
| cgaagccctcggcgaacc, | (SEQ ID No. 1118) |
| gcgtgttctggctgtgcagttcgg, | (SEQ ID No. 1119) |
| ctgccccgttgacc, | (SEQ ID No. 1120) |
| aggtttgcgtagac, | (SEQ ID No. 1121) |
| ggttgaagttgctg, | (SEQ ID No. 1122) |
| ctgggttgaagttg, | (SEQ ID No. 1123) |
| tgctgcacgggcatctgctg, | (SEQ ID No. 1124) |
| ggcactgtctgaggctcctccttcagg, | (SEQ ID No. 1125) |
| actccatgtcgatg, | (SEQ ID No. 1126) |
| ctctccgccttgatcc, | (SEQ ID No. 1127) |
| gttcctcatgcgcttc, | (SEQ ID No. 1128) |
| ctgagctttcaagg, | (SEQ ID No. 1129) |
| gcgattctctccagcttcctttttcg, | (SEQ ID No. 1130) |
| ctgagctttcaaggttttcactttttcctc, | (SEQ ID No. 1131) |
| tccctgagcatgtt, | (SEQ ID No. 1132) |
| tctgtttaagctgtgc, | (SEQ ID No. 1133) |
| ctttctgtttaagctgtg, | (SEQ ID No. 1134) |
| ggttcatgactttctg, | (SEQ ID No. 1135) |
| cgtggttcatgact, | (SEQ ID No. 1136) |
| actgttaacgtggttc, | (SEQ ID No. 1137) |
| ccactgttaacgtg, | (SEQ ID No. 1138) |
| cccactgttaacgt, | (SEQ ID No. 1139) |
| agcatgagttggca, | (SEQ ID No. 1140) |
| gcgttagcatgagt, | (SEQ ID No. 1141) |
| gtttgcaactgctg, | (SEQ ID No. 1142) |
| caaaatgtttgcaactgc, | (SEQ ID No. 1143) |
| tccattttagtgcacatc, | (SEQ ID No. 1144) |
| ctgttccattttagtgca, | (SEQ ID No. 1145) |
| gtgtatgagtcgtc, | (SEQ ID No. 1146) |
| ctgtgtatgagtcg, | (SEQ ID No. 1147) |
| cgtagctgtgtatg, | (SEQ ID No. 1148) |
| tcgtgtagagagag, | (SEQ ID No. 1149) |
| agtttgtagtcgtgtaga, | (SEQ ID No. 1150) |
| gtttgtagtcgtgtag, | (SEQ ID No. 1151) |
| agtttgtagtcgtg, | (SEQ ID No. 1152) |
| ggagtttgtagtcg, | (SEQ ID No. 1153) |
| tcaggagtttgtagtc, | (SEQ ID No. 1154) |
| gtttcaggagtttgtagt, | (SEQ ID No. 1155) |
| tcggtttcaggagt, | (SEQ ID No. 1156) |
| ttgagactccggta, | (SEQ ID No. 1157) |
| accagaaaagtagctg, | (SEQ ID No. 1158) |
| cctgaccagaaaag, | (SEQ ID No. 1159) |
| attcaggcgttcca, | (SEQ ID No. 1160) |
| ggtaaaagtactgtcc, | (SEQ ID No. 1161) |
| gggtaaaagtactgtc, | (SEQ ID No. 1162) |
| gcacctccaccgctgcca, | (SEQ ID No. 1163) |
| ctcctgctcctcggtgac, | (SEQ ID No. 1164) |
| gctttgacaaagcc, | (SEQ ID No. 1165) |
| cttgtgcagatcgt, | (SEQ ID No. 1166) |
| tcatcttgtgcagatc, | (SEQ ID No. 1167) |
| gttcatcttgtgcaga, | (SEQ ID No. 1168) |
| cgtggttcatcttg, | (SEQ ID No. 1169) |
| tcacgtggttcatc, | (SEQ ID No. 1170) |
| ggttggtgtaaacg, | (SEQ ID No. 1171) |
| tacgagctcccggtcccgac, | (SEQ ID No. 1172) |
| tagctgatggtggt, | (SEQ ID No. 1173) |
| tccttgaaggtgga, | (SEQ ID No. 1174) |
| tcttccatgttgatgg, | (SEQ ID No. 1175) |
| ctttgatgcgctct, | (SEQ ID No. 1176) |
| ctccactttgatgc, | (SEQ ID No. 1177) |
| gctccagcttccgcttccggcacttggtgg, | (SEQ ID No. 1178) |
| ggccttgagcgtcttcaccttgtcctccag, | (SEQ ID No. 1179) |
| tgaccttctgtttgag, | (SEQ ID No. 1180) |
| catgaccttctgtttg, | (SEQ ID No. 1181) |
| gtcatgaccttctg, | (SEQ ID No. 1182) |
| cgagaacatcatcg, | (SEQ ID No. 1183) |
| gtagtctgcgttga, | (SEQ ID No. 1184) |
| gctgcagcgggaggatgacg, | (SEQ ID No. 1185) |
| agtaagagaggctatc, | (SEQ ID No. 1186) |
| gtagtaagagaggc, | (SEQ ID No. 1187) |
| ggtagtaagagagg, | (SEQ ID No. 1188) |
| gtgagtggtagtaaga, | (SEQ ID No. 1189) |
| gtccgtgcagaagtcctg, | (SEQ ID No. 1190) |
| gaatgaagttggcact, | (SEQ ID No. 1191) |
| ggaatgaagttggc, | (SEQ ID No. 1192) |
| gggaatgaagttgg, | (SEQ ID No. 1193) |
| gctgcaccagccactgcaggtccggactgg, | (SEQ ID No. 1194) |
| tcatggtcttcacaac, | (SEQ ID No. 1195) |
| caatgctctgcgctcggcctcctgtcatgg, | (SEQ ID No. 1196) |
| ctagagttcctcac, | (SEQ ID No. 1197) |
| gagtacgctagagt, | (SEQ ID No. 1198) |
| gaagagtacgctag, | (SEQ ID No. 1199) |
| ctgcttcccacccagcccccacattccc, | (SEQ ID No. 1200) |
| ttcatcctctgtactgggct, | (SEQ ID No. 1201) |
| gttacggatgtgca, | (SEQ ID No. 1202) |
| cagttacggatgtg, | (SEQ ID No. 1203) |
| ccagttacggatgt, | (SEQ ID No. 1204) |
| agagtctgagttgg, | (SEQ ID No. 1205) |
| gtgagactcagagt, | (SEQ ID No. 1206) |
| tcttagggtgagac, | (SEQ ID No. 1207) |
| gagagtacttcttagg, | (SEQ ID No. 1208) |
| ggaagaaactatgagagt, | (SEQ ID No. 1209) |
| cttagggaagaaactatg, | (SEQ ID No. 1210) |
| cggtaagaaacttagg, | (SEQ ID No. 1211) |
| agcatgcggtaaga, | (SEQ ID No. 1212) |
| gtctgaaagcatgc, | (SEQ ID No. 1213) |
| agaacaaagaagagcc, | (SEQ ID No. 1214) |
| caagagaacaaagaagag, | (SEQ ID No. 1215) |
| cagcaagagaacaaag, | (SEQ ID No. 1216) |
| tcctcagcaagaga, | (SEQ ID No. 1217) |
| aggtgtgacttgca, | (SEQ ID No. 1218) |
| gaataggtgtgacttg, | (SEQ ID No. 1219) |
| cagaataggtgtgact, | (SEQ ID No. 1220) |
| gcagaataggtgtg, | (SEQ ID No. 1221) |
| cagttgcagaataggt, | (SEQ ID No. 1222) |
| gaaaccatttctgacc, | (SEQ ID No. 1223) |
| tgtgaaaccatttctgac, | (SEQ ID No. 1224) |
| cactgtgaaaccatttct, | (SEQ ID No. 1225) |
| ccactgtgaaacca, | (SEQ ID No. 1226) |
| agaactggctcctgcagcttccctgcttcc, | (SEQ ID No. 1227) |
| cacctccattcaccc, | (SEQ ID No. 1228) |
| cagtaaaagtgtctgc, | (SEQ ID No. 1229) |
| cgacattcagtaaaagtg, | (SEQ ID No. 1230) |
| gaccgacattcagt, | (SEQ ID No. 1231) |
| cttctggagataactaga, | (SEQ ID No. 1232) |
| catcttattcctttccct, | (SEQ ID No. 1233) |
| cagccatcttattcct, | (SEQ ID No. 1234) |
| tgcagccatcttattc, | (SEQ ID No. 1235) |
| gagtgtatcagtcag, | (SEQ ID No. 1236) |
| ggagtgtatcagtc, | (SEQ ID No. 1237) |
| cttggagtgtatcagt, | (SEQ ID No. 1238) |
| acagagtacctacc, | (SEQ ID No. 1239) |
| ccaactttcccttaag, | (SEQ ID No. 1240) |
| ccttatgctcaatctc, | (SEQ ID No. 1241) |
| gtcttactcaaggg, | (SEQ ID No. 1242) |
| acagtcttactcaagg, | (SEQ ID No. 1243) |
| cataagacacagtcttac, | (SEQ ID No. 1244) |
| gaaagcataagacacagt, | (SEQ ID No. 1245) |
| ggaaagcataagacac, | (SEQ ID No. 1246) |
| agggataaaggaaagc, | (SEQ ID No. 1247) |
| cctgtatacagagg, | (SEQ ID No. 1248) |
| tgtctcctgtatacag, | (SEQ ID No. 1249) |
| catcttctagttggtc, | (SEQ ID No. 1250) |
| ctcatcttctagttgg, | (SEQ ID No. 1251) |
| cttctcatcttctagttg, | (SEQ ID No. 1252) |
| caaagcagacttctca, | (SEQ ID No. 1253) |
| ctgcaaagcagact, | (SEQ ID No. 1254) |
| ctagtttttccttctcct, | (SEQ ID No. 1255) |
| tctagtttttccttctcc, | (SEQ ID No. 1256) |
| caggatgaactctagt, | (SEQ ID No. 1257) |
| tcgtagaaggtcgt, | (SEQ ID No. 1258) |
| agggttactgtagc, | (SEQ ID No. 1259) |
| gtagtggtgatgtg, | (SEQ ID No. 1260) |
| cgtcgtagaaggtc, | (SEQ ID No. 1261) |
| tttcgtgcacatcc, | (SEQ ID No. 1262) |
| agtttgtagtcgtgaaga, | (SEQ ID No. 1263) |
| cgagaacatcatgg, | (SEQ ID No. 1264) |
| gtagtaggaaaggc, | (SEQ ID No. 1265) |
| ggtagtaggaaagg, | (SEQ ID No. 1266) |
| ggaatggtagtagg, | (SEQ ID No. 1267) |
| ggtcattgagaagag, | (SEQ ID No. 1268) |
| gctaatgttcttgacc, | (SEQ ID No. 1269) |
| gccaaggtcctcat, | (SEQ ID No. 1270) |
| ggagtctatctcca, | (SEQ ID No. 1271) |
| ccaaagaatcctgact, | (SEQ ID No. 1272) |
| cacatgcttagtgg, | (SEQ ID No. 1273) |
| ctcgtaaatgaccg, | (SEQ ID No. 1274) |
| aggaatctcgtaaatgac, | (SEQ ID No. 1275) |
| cagcagcgattcat, | (SEQ ID No. 1276) |
| ggagatcatcaaagga, | (SEQ ID No. 1277) |
| ctcagcaatggtca, | (SEQ ID No. 1278) |
| gatctcgaacacct, | (SEQ ID No. 1279) |
| cacaatctcgatctttct, | (SEQ ID No. 1280) |
| ccttcttaaagattggct, | (SEQ ID No. 1281) |
| cacataccaactgg, | (SEQ ID No. 1282) |
| agcttgatgtgagg, | (SEQ ID No. 1283) |
| gaagttgtagcttgatgt, | (SEQ ID No. 1284) |
| gcttgaagttgtagct, | (SEQ ID No. 1285) |
| ctgcttgaagttgtag, | (SEQ ID No. 1286) |
| gacacaactcctct, | (SEQ ID No. 1287) |
| tcctttgatagacacaac, | (SEQ ID No. 1288) |
| ctcgtttgatagacac, | (SEQ ID No. 1289) |
| ggttagcacacact, | (SEQ ID No. 1290) |
| ggtaacggttagca, | (SEQ ID No. 1291) |
| cgtaacacatttagaagc, | (SEQ ID No. 1292) |
| ctcatccgtaacac, | (SEQ ID No. 1293) |
| ccggtaagtattgtagtt, | (SEQ ID No. 1294) |
| ggtgtatttccttgac, | (SEQ ID No. 1295) |
| acataccaactggtgt, | (SEQ ID No. 1296) |
| gtccctatacgaac, | (SEQ ID No. 1297) |
| ttcatgtctgtgcc, | (SEQ ID No. 1298) |
| gtaggtgagttcca, | (SEQ ID No. 1299) |
| gttgtgagcgatga, | (SEQ ID No. 1300) |
| catagttgtcctcaaaga, | (SEQ ID No. 1301) |
| ggcatagttgtcct, | (SEQ ID No. 1302) |
| cattgtctagcacg, | (SEQ ID No. 1303) |
| ctccattgtctagc, | (SEQ ID No. 1304) |
| gtattgttcagcgg, | (SEQ ID No. 1305) |
| tcaagatctctgtgag, | (SEQ ID No. 1306) |
| cacaaaatcgtgtcct, | (SEQ ID No. 1307) |
| tccttccacaaaatcg, | (SEQ ID No. 1308) |
| gtggaagatgtcct, | (SEQ ID No. 1309) |
| tcttgtggaagatgtc, | (SEQ ID No. 1310) |
| tctatcagtgtgagag, | (SEQ ID No. 1311) |
| ggttggtgtctatc, | (SEQ ID No. 1312) |
| acatcggagaacag, | (SEQ ID No. 1313) |
| ccttacacatcgga, | (SEQ ID No. 1314) |
| acaatcctcagaactc, | (SEQ ID No. 1315) |
| gctctgacaatcct, | (SEQ ID No. 1316) |
| tggttgaagtggag, | (SEQ ID No. 1317) |
| ctgtggttgaagtg, | (SEQ ID No. 1318) |
| gttgtaggtgacca, | (SEQ ID No. 1319) |
| ctgtgttgtaggtg, | (SEQ ID No. 1320) |
| gactcaaacgtgtc, | (SEQ ID No. 1321) |
| catggactcaaacg, | (SEQ ID No. 1322) |
| cgaatgtataccgg, | (SEQ ID No. 1323) |
| ccgaatgtataccg, | (SEQ ID No. 1324) |
| gccgaatgtatacc, | (SEQ ID No. 1325) |
| gtagttgtagggac, | (SEQ ID No. 1326) |
| tagaaaggtagttgtagg, | (SEQ ID No. 1327) |
| gtagaaaggtagttgtag, | (SEQ ID No. 1328) |
| cgtagaaaggtagttg, | (SEQ ID No. 1329) |
| ccgtagaaaggtag, | (SEQ ID No. 1330) |
| gaccatagcacact, | (SEQ ID No. 1331) |
| ggatattggcactg, | (SEQ ID No. 1332) |
| cctggatattggca, | (SEQ ID No. 1333) |
| gctcccaaagatct, | (SEQ ID No. 1334) |
| cccatcaaagctct, | (SEQ ID No. 1335) |
| caaacacttggagc, | (SEQ ID No. 1336) |
| gtctcaaacacttgga, | (SEQ ID No. 1337) |
| gagtctcaaacacttg, | (SEQ ID No. 1338) |
| gtaacctgtgatctct, | (SEQ ID No. 1339) |
| ggtaacctgtgatc, | (SEQ ID No. 1340) |
| gtataggtaacctgtg, | (SEQ ID No. 1341) |
| tgagatgtataggtaacc, | (SEQ ID No. 1342) |
| tgctgagatgtatagg, | (SEQ ID No. 1343) |
| ccatgctgagatgt, | (SEQ ID No. 1344) |
| ggattacttgcagg, | (SEQ ID No. 1345) |
| tgttatggtggatgag, | (SEQ ID No. 1346) |
| ggtgttatggtgga, | (SEQ ID No. 1347) |
| gcagttgacacact, | (SEQ ID No. 1348) |
| agtactcggcattc, | (SEQ ID No. 1349) |
| cattcacatactccct, | (SEQ ID No. 1350) |
| tccaaaacaggtcact, | (SEQ ID No. 1351) |
| ggtccttatagtgg, | (SEQ ID No. 1352) |
| cagaatgccaacca, | (SEQ ID No. 1353) |
| acgagaatgccaac, | (SEQ ID No. 1354) |
| gatcccaaagacca, | (SEQ ID No. 1355) |
| tcgcttgatgagga, | (SEQ ID No. 1356) |
| catcgtgtacttcc, | (SEQ ID No. 1357) |
| gcatcgtgtacttc, | (SEQ ID No. 1358) |
| actgtgccaaaagc, | (SEQ ID No. 1359) |
| cttgtagactgtgc, | (SEQ ID No. 1360) |
| cccttgtagactgt, | (SEQ ID No. 1361) |
| tcaacactttgatggc, | (SEQ ID No. 1362) |
| ccctcaacactttg, | (SEQ ID No. 1363) |
| gtgttttccctcaaca, | (SEQ ID No. 1364) |
| gtatgcttcgtctaag, | (SEQ ID No. 1365) |
| cgtatgcttcgtct, | (SEQ ID No. 1366) |
| ccatcacgtatgct, | (SEQ ID No. 1367) |
| gcataagctgtgtc, | (SEQ ID No. 1368) |
| catggtctaagagg, | (SEQ ID No. 1369) |
| caatctgcatacacca, | (SEQ ID No. 1370) |
| ggcaatctgcatac, | (SEQ ID No. 1371) |
| ctgtctcgtcaatg, | (SEQ ID No. 1372) |
| cataactccacacatc, | (SEQ ID No. 1373) |
| agtcacaccataactc, | (SEQ ID No. 1374) |
| acagtcacaccataac, | (SEQ ID No. 1375) |
| ccccaaaagtcatc, | (SEQ ID No. 1376) |
| tcgtaaggtttggc, | (SEQ ID No. 1377) |
| gatcccatcgtaag, | (SEQ ID No. 1378) |
| caatggtgcagatg, | (SEQ ID No. 1379) |
| gacatcaatggtgc, | (SEQ ID No. 1380) |
| gtagacatcaatggtg, | (SEQ ID No. 1381) |
| catgatcatgtagacatc, | (SEQ ID No. 1382) |
| ccatgatcatgtagac, | (SEQ ID No. 1383) |
| catttgaccatgatcatg, | (SEQ ID No. 1384) |
| ccaacatttgaccatg, | (SEQ ID No. 1385) |
| tcatccaacatttgacca, | (SEQ ID No. 1386) |
| gagtcaatcatccaacat, | (SEQ ID No. 1387) |
| cagagtcaatcatcca, | (SEQ ID No. 1388) |
| ccgacattcagagt, | (SEQ ID No. 1389) |
| gaattcagacaccaac, | (SEQ ID No. 1390) |
| gatgaccacaaagc, | (SEQ ID No. 1391) |
| ccatcaaatacatcgg, | (SEQ ID No. 1392) |
| tcaccatcaaatacatcg, | (SEQ ID No. 1393) |
| caacgtagccatca, | (SEQ ID No. 1394) |
| acgtctttgacgac, | (SEQ ID No. 1395) |
| caaaaacgtctttgacga, | (SEQ ID No. 1396) |
| ggcaaaaacgtctttg, | (SEQ ID No. 1397) |
| caaaggcaaaaacgtc, | (SEQ ID No. 1398) |
| gtgtcaagtactcg, | (SEQ ID No. 1399) |
| gtaatagaggttgtcg, | (SEQ ID No. 1400) |
| cccagtaatagagg, | (SEQ ID No. 1401) |
| catggtgctcactg, | (SEQ ID No. 1402) |
| gtgcctgtacgtac, | (SEQ ID No. 1403) |
| tgcaggtggatagt, | (SEQ ID No. 1404) |
| catgtcgatagtcttgca, | (SEQ ID No. 1405) |
| gtcgatagtcttgc, | (SEQ ID No. 1406) |
| ccatgtcgatagtc, | (SEQ ID No. 1407) |
| ctccatgtcgatag, | (SEQ ID No. 1408) |
| cttggacaggatct, | (SEQ ID No. 1409) |
| tgctgttgtacagg, | (SEQ ID No. 1410) |
| gtgctgttgtacag, | (SEQ ID No. 1411) |
| ttggcgtagtagtc, | (SEQ ID No. 1412) |
| tccaccattagcac, | (SEQ ID No. 1413) |
| gatttcgttgtggg, | (SEQ ID No. 1414) |
| gtcatagatttcgttgtg, | (SEQ ID No. 1415) |
| tgtactctgcttgaac, | (SEQ ID No. 1416) |
| gtgtactctgcttg, | (SEQ ID No. 1417) |
| tgctgtgtgtactc, | (SEQ ID No. 1418) |
| ctgatgtgttgaagaaca, | (SEQ ID No. 1419) |
| ctctgatgtgttgaag, | (SEQ ID No. 1420) |
| gctctgatgtgttg, | (SEQ ID No. 1421) |
| gagctctgatgtgt, | (SEQ ID No. 1422) |
| cacttttaacttgagcct, | (SEQ ID No. 1423) |
| ctccacttttaacttgag, | (SEQ ID No. 1424) |
| tgctgtatttctggtaca, | (SEQ ID No. 1425) |
| ccaggaattgttgc, | (SEQ ID No. 1426) |
| ttgctgaggtatcg, | (SEQ ID No. 1427) |
| gataaccactctgg, | (SEQ ID No. 1428) |
| caaaagataaccactctg, | (SEQ ID No. 1429) |
| cggtgacatcaaaag, | (SEQ ID No. 1430) |
| cctcaatttcccct, | (SEQ ID No. 1431) |
| gttatccctgctgt, | (SEQ ID No. 1432) |
| gcagtgtgttatcc, | (SEQ ID No. 1433) |
| gatgtccacttgca, | (SEQ ID No. 1434) |
| tagtgaacccgttg, | (SEQ ID No. 1435) |
| tgccatgaatggtg, | (SEQ ID No. 1436) |
| gttcatgccatgaatg, | (SEQ ID No. 1437) |
| catgagaagcagga, | (SEQ ID No. 1438) |
| gctttgcagatgct, | (SEQ ID No. 1439) |
| gagctttgcagatg, | (SEQ ID No. 1440) |
| tagttggtgtccag, | (SEQ ID No. 1441) |
| ctgaagcaatagttgg, | (SEQ ID No. 1442) |
| agctgaagcaatagttgg, | (SEQ ID No. 1443) |
| ggagctgaagcaat, | (SEQ ID No. 1444) |
| caatgtacagctgc, | (SEQ ID No. 1445) |
| ggaagtcaatgtacag, | (SEQ ID No. 1446) |
| cggaagtcaatgtac, | (SEQ ID No. 1447) |
| gcggaagtcaatgt, | (SEQ ID No. 1448) |
| agttggcatggtag, | (SEQ ID No. 1449) |
| gcagaagttggcat, | (SEQ ID No. 1450) |
| ctccaaatgtaggg, | (SEQ ID No. 1451) |
| accttgctgtactg, | (SEQ ID No. 1452) |
| tgctggttgtacag, | (SEQ ID No. 1453) |
| ggttatgctggttg, | (SEQ ID No. 1454) |
| gtagtacacgatgg, | (SEQ ID No. 1455) |
| cgtagtacacgatg, | (SEQ ID No. 1456) |
| cacgtagtacacga, | (SEQ ID No. 1457) |
| catgttggacagct, | (SEQ ID No. 1458) |
| gcacgatcatgttg, | (SEQ ID No. 1459) |
| cacacagtagtgca, | (SEQ ID No. 1460) |
| gatcagaaaagcgc, | (SEQ ID No. 1461) |
| accgtgaccagatg, | (SEQ ID No. 1462) |
| gtagacaggctgag, | (SEQ ID No. 1463) |
| tatcgagtgtgctg, | (SEQ ID No. 1464) |
| ttgcgcatgaactg, | (SEQ ID No. 1465) |
| ttgctcaggatctg, | (SEQ ID No. 1466) |
| actggtgagcttca, | (SEQ ID No. 1467) |
| gctcaggatagtct, | (SEQ ID No. 1468) |
| tgtagatggaaatcacct, | (SEQ ID No. 1469) |
| tggtgctgttgtag, | (SEQ ID No. 1470) |
| ttctcctggagcaa, | (SEQ ID No. 1471) |
| tactcttcgtcgct, | (SEQ ID No. 1472) |
| cttggcgtagtact, | (SEQ ID No. 1473) |
| cggcatgtctattttgta, | (SEQ ID No. 1474) |
| cgggatggcatttt, | (SEQ ID No. 1475) |
| ctgtagaaagtggg, | (SEQ ID No. 1476) |
| acaattctgaagtagggt, | (SEQ ID No. 1477) |
| attgctgagacgtcaaat, | (SEQ ID No. 1478) |
| tctccattgctgag, | (SEQ ID No. 1479) |
| tcaccaaattggaagcat, | (SEQ ID No. 1480) |
| ctctgaactctgct, | (SEQ ID No. 1481) |
| aacgaaagactctgaact, | (SEQ ID No. 1482) |
| tgggttctgcaaac, | (SEQ ID No. 1483) |
| ctggcttttgggtt, | (SEQ ID No. 1484) |
| gttgttcaggcact, | (SEQ ID No. 1485) |
| tctgatatagctcaatcc, | (SEQ ID No. 1486) |
| tctttggacttgagaatc, | (SEQ ID No. 1487) |
| tgggttggagatgt, | (SEQ ID No. 1488) |
| tgctgtcgatgtag, | (SEQ ID No. 1489) |
| acaactttgctgtcga, | (SEQ ID No. 1490) |
| attcgccttctgct, | (SEQ ID No. 1491) |
| gaaggagagccatt, | (SEQ ID No. 1492) |
| tcagttacatcgaagg, | (SEQ ID No. 1493) |
| tgaagccattcatgaaca, | (SEQ ID No. 1494) |
| tcctgtctttatggtg, | (SEQ ID No. 1495) |
| aaatcccaggttcc, | (SEQ ID No. 1496) |
| ggacagtgtaagcttatt, | (SEQ ID No. 1497) |
| gtacaaaagtgcagca, | (SEQ ID No. 1498) |
| tagatggtacaaaagtgc, | (SEQ ID No. 1499) |
| cacttttatttgggatgatg, | (SEQ ID No. 1500) |
| gcaaatcttgcttctagt, | (SEQ ID No. 1501) |
| gtgccatcaatacc, | (SEQ ID No. 1502) |
| ggtatatgtggagg, | (SEQ ID No. 1503) |
| tctgatcaccactg, | (SEQ ID No. 1504) |
| tcctagtggactttatag, | (SEQ ID No. 1505) |
| tttttcctagtggact, | (SEQ ID No. 1506) |
| caataacattagcagg, | (SEQ ID No. 1507) |
| aagtctgtaggagg, | (SEQ ID No. 1508) |
| tctgttgtgactcaag, | (SEQ ID No. 1509) |
| gttggtctgttgtg, | (SEQ ID No. 1510) |
| caaagcacgcttct, | (SEQ ID No. 1511) |
| tttctaaagcaataggcc, | (SEQ ID No. 1512) |
| gcaattatcctgcaca, | (SEQ ID No. 1513) |
| acgtaggcagcaat, | (SEQ ID No. 1514) |
| atcaatgtaaagtggacg, | (SEQ ID No. 1515) |
| ctagatccctcttg, | (SEQ ID No. 1516) |
| ccatttccacccta, | (SEQ ID No. 1517) |
| tgggttcgtgtatc, | (SEQ ID No. 1518) |
| tggcattgtaccct, | (SEQ ID No. 1519) |
| tccagcacagaagt, | (SEQ ID No. 1520) |
| ataaatacgggcatgc, | (SEQ ID No. 1521) |
| agtgtctgaactcc, | (SEQ ID No. 1522) |
| tgtgctgagtgtct, | (SEQ ID No. 1523) |
| ataagctcaggacc, | (SEQ ID No. 1524) |
| aggagaagcagatg, | (SEQ ID No. 1525) |
| agcaaggagaagca, | (SEQ ID No. 1526) |
| aatcttgggacacg, | (SEQ ID No. 1527) |
| tagagaatggttagaggt, | (SEQ ID No. 1528) |
| gttttgccaatgtagtag, | (SEQ ID No. 1529) |
| cttgggtgttttgc, | (SEQ ID No. 1530) |
| gcaagactttacaatc, | (SEQ ID No. 1531) |
| gcatttgcaagactttac, | (SEQ ID No. 1532) |
| tttagctgcatttgcaag, | (SEQ ID No. 1533) |
| gccacttttccaag, | (SEQ ID No. 1534) |
| ttggtcttgccact, | (SEQ ID No. 1535) |
| cagcacacagtagt, | (SEQ ID No. 1536) |
| cgatagtcttgcag, | (SEQ ID No. 1537) |
| ctttcaccaaattggaag, | (SEQ ID No. 1538) |
| caccaaattggaagc, | (SEQ ID No. 1539) |
| tcaccaaattggaagc, | (SEQ ID No. 1540) |
| ctctggcttttggg, | (SEQ ID No. 1541) |
| cggcatgtctattttg, | (SEQ ID No. 1542) |
| cactacagacgagc, | (SEQ ID No. 1543) |
| cgtgcactacagacg, | (SEQ ID No. 1544) |
| ggaacagttcgtcc, | (SEQ ID No. 1545) |
| gaacagttcgtccatg, | (SEQ ID No. 1546) |
| ccagagtttcggttc, | (SEQ ID No. 1547) |
| ctaggactgggacag, | (SEQ ID No. 1548) |
| cgcacttgtagcg, | (SEQ ID No. 1549) |
| ctcgcacttgtagc, | (SEQ ID No. 1550) |
| gcacttgtagc, | (SEQ ID No. 1551) |
| gcgcactgtccctg, | (SEQ ID No. 1552) |
| ccagggagatgcgc, | (SEQ ID No. 1553) |
| gccggtgaggagg, | (SEQ ID No. 1554) |
| ccggtgaggaggg, | (SEQ ID No. 1555) |
| cggttcactcggc, | (SEQ ID No. 1556) |
| gagtttcggttcactc, | (SEQ ID No. 1557) |
| ggcacgattgtcaaag, | (SEQ ID No. 1558) |
| caggcgtcaccccc, | (SEQ ID No. 1559) |
| gcaggcgtcaccc, | (SEQ ID No. 1560) |
| ctccctcctaagc, | (SEQ ID No. 1561) |
| ccctcctaagcgg, | (SEQ ID No. 1562) |
| cgagtccgcgttcg, | (SEQ ID No. 1563) |
| catcttctgccattc, | (SEQ ID No. 1564) |
| gtgttttcccaccag, | (SEQ ID No. 1565) |
| ggttttggttcactag, | (SEQ ID No. 1566) |
| gcatcttcacgtctcc, | (SEQ ID No. 1567) |
| cttcacgtctcctgtc, | (SEQ ID No. 1568) |
| gtcaccgcgtagtc, | (SEQ ID No. 1569) |
| caaataggcaaggtc, | (SEQ ID No. 1570) |
| cttgcaaataggcaag, | (SEQ ID No. 1571) |
| tgcttgcaaatagg, | (SEQ ID No. 1572) |
| ctgcttgcaaatagg, | (SEQ ID No. 1573) |
| gcaggtggatattt, | (SEQ ID No. 1574) |
| ctgctgttggcag, | (SEQ ID No. 1575) |
| cactagtttccaagt, | (SEQ ID No. 1576) |
| gttttggttcactag, | (SEQ ID No. 1577) |
| ctttgatttcaggatag, | (SEQ ID No. 1578) |
| gcacttcttctttatct, | (SEQ ID No. 1579) |
| ccaagtcagatttcc, | (SEQ ID No. 1580) |
| gtttccaagtcagatttc, | (SEQ ID No. 1581) |
| ggttcactagtttcc, | (SEQ ID No. 1582) |
| ggttttggttcactag, | (SEQ ID No. 1583) |
| ccgaaaaattgggca, | (SEQ ID No. 1584) |
| ccgaaaaattggg, | (SEQ ID No. 1585) |
| ctatccgaaaaattgg, | (SEQ ID No. 1586) |
| gttgataatgtcatcag, | (SEQ ID No. 1587) |
| ctcatgttgataatgtc, | (SEQ ID No. 1588) |
| ctgtcaccgcgtag, | (SEQ ID No. 1589) |
| cgtctcctgtcaccg, | (SEQ ID No. 1590) |
| cttcacgtctcctg, | (SEQ ID No. 1591) |
| gagaactttatcatgtc, | (SEQ ID No. 1592) |
| gctatatgcaggg, | (SEQ ID No. 1593) |
| ccagctgctatatgcagg, | (SEQ ID No. 1594) |
| aggctaaattttgcct, | (SEQ ID No. 1595) |
| ggctaaattttgcc, | (SEQ ID No. 1596) |
| ggctaaattttgccttc, | (SEQ ID No. 1597) |
| gcaggctaaattttgcc, | (SEQ ID No. 1598) |
| gagttacccaagcg, | (SEQ ID No. 1599) |
| cagagttacccaagcg, | (SEQ ID No. 1600) |
| cagagttacccaag, | (SEQ ID No. 1601) |
| acagagttacccaag, | (SEQ ID No. 1602) |
| ggtgcaaaacagag, | (SEQ ID No. 1603) |
| ctaggtgcaaaacag, | (SEQ ID No. 1604) |
| gagaactttatcatgtcc, | (SEQ ID No. 1605) |
| gctagatgaatggc, | (SEQ ID No. 1606) |
| gcaaacatggcaggc, | (SEQ ID No. 1607) |
| cagcaaacatggca, | (SEQ ID No. 1608) |
| gcagcaaacatggc, | (SEQ ID No. 1609) |
| agcagcaaacatgg, | (SEQ ID No. 1610) |
| cagcagcaaacatg, | (SEQ ID No. 1611) |
| agcagcagcaaaca, | (SEQ ID No. 1612) |
| cagcagcagcaaaca, | (SEQ ID No. 1613) |
| cagcagcagcaaac, | (SEQ ID No. 1614) |
| caccagcagcagca, | (SEQ ID No. 1615) |
| gcattgacgtcagc, | (SEQ ID No. 1616) |
| gatgttgtcgtgctc, | (SEQ ID No. 1617) |
| tgagatgttgtcgtgct, | (SEQ ID No. 1618) |
| tgagatgttgtcgtg, | (SEQ ID No. 1619) |
| gccaatgagatgttg, | (SEQ ID No. 1620) |
| ctgccaatgagatg, | (SEQ ID No. 1621) |
| cacatgggcatcac, | (SEQ ID No. 1622) |
| tgtccacatgggca, | (SEQ ID No. 1623) |
| gtactgtccacatg, | (SEQ ID No. 1624) |
| cagctgctatatgc, | (SEQ ID No. 1625) |
| gttctccaccaggg, | (SEQ ID No. 1626) |
| agttctccaccagg, | (SEQ ID No. 1627) |
| caaagttctccaccag, | (SEQ ID No. 1628) |
| ccaagagtcatccagg, | (SEQ ID No. 1629) |
| cccaagagtcatcc, | (SEQ ID No. 1630) |
| cctgcattttcccaag, | (SEQ ID No. 1631) |
| tcctgcattttccc, | (SEQ ID No. 1632) |
| gccatatctagaggc, | (SEQ ID No. 1633) |
| tcacatcttcagcc, | (SEQ ID No. 1634) |
| gcttcacatcttcagc, | (SEQ ID No. 1635) |
| cagcttcacatcttc, | (SEQ ID No. 1636) |
| gtaacttatacagctgc, | (SEQ ID No. 1637) |
| ccagtttttgtctgg, | (SEQ ID No. 1638) |
| ccatttgtctcagg, | (SEQ ID No. 1639) |
| gtgtagcccatttg, | (SEQ ID No. 1640) |
| gcttcggtgtagcc, | (SEQ ID No. 1641) |
| gatcacttcaattgcttc, | (SEQ ID No. 1642) |
| cttgtggaggcagg, | (SEQ ID No. 1643) |
| gctgccttgtggag, | (SEQ ID No. 1644) |
| ctatttgctgccttgtgg, | (SEQ ID No. 1645) |
| ggatgtctccacgc, | (SEQ ID No. 1646) |
| ggaaggatgtctcc, | (SEQ ID No. 1647) |
| tgcggaaggatgtc, | (SEQ ID No. 1648) |
| gtttgcggaaggatgtc, | (SEQ ID No. 1649) |
| gctgagtttgcgga, | (SEQ ID No. 1650) |
| ggtaaagctgagtttg, | (SEQ ID No. 1651) |
| tcggtaaagctgag, | (SEQ ID No. 1652) |
| gactcggtaaagctg, | (SEQ ID No. 1653) |
| agagactcggtaaagc, | (SEQ ID No. 1654) |
| gaaattgtcagcaggc, | (SEQ ID No. 1655) |
| gaaattgtcagcagg, | (SEQ ID No. 1656) |
| ggaaattgtcagcagg, | (SEQ ID No. 1657) |
| ggaaattgtcagcag, | (SEQ ID No. 1658) |
| gggaaattgtcagc, | (SEQ ID No. 1659) |
| gtgtgggaaattgtc, | (SEQ ID No. 1660) |
| ggtttacacggtgtg, | (SEQ ID No. 1661) |
| gctttggtttacacg, | (SEQ ID No. 1662) |
| gcacctttgggatgc, | (SEQ ID No. 1663) |
| ccaggttctgcttcc, | (SEQ ID No. 1664) |
| gctctgtctagtggc, | (SEQ ID No. 1665) |
| actctccatgtctc, | (SEQ ID No. 1666) |
| caactctccatgtctc, | (SEQ ID No. 1667) |
| caactctccatgtc, | (SEQ ID No. 1668) |
| agcaactctccatg, | (SEQ ID No. 1669) |
| gtagcaactctccatg, | (SEQ ID No. 1670) |
| gtagcaactctcca, | (SEQ ID No. 1671) |
| ggttgtagcaactctcc, | (SEQ ID No. 1672) |
| cgggcagtcctcca, | (SEQ ID No. 1673) |
| gcaccgggcagtc, | (SEQ ID No. 1674) |
| aggcaccgggcag, | (SEQ ID No. 1675) |
| gtgtgttaccaggtc, | (SEQ ID No. 1676) |
| tgtgtgttaccaggt, | (SEQ ID No. 1677) |
| tgggtcactgtgtg, | (SEQ ID No. 1678) |
| cagactgtgggcatg, | (SEQ ID No. 1679) |
| cccaccagactgtggg, | (SEQ ID No. 1680) |
| ccaccagactgtgg, | (SEQ ID No. 1681) |
| tgcccaccagactg, | (SEQ ID No. 1682) |
| cggcttcctcccc, | (SEQ ID No. 1683) |
| ccttgtcttccacc, | (SEQ ID No. 1684) |
| accgaggctgccac, | (SEQ ID No. 1685) |
| ggaagaaaccgagg, | (SEQ ID No. 1686) |
| gggaagaaaccgag, | (SEQ ID No. 1687) |
| ggccatctgcgcc, | (SEQ ID No. 1688) |
| gcggccatctgcg, | (SEQ ID No. 1689) |
| gtggcggccatctg, | (SEQ ID No. 1690) |
| accgtggcggccat, | (SEQ ID No. 1691) |
| gccgctcaatcttcatc, | (SEQ ID No. 1692) |
| cttcatcttgtgatagg, | (SEQ ID No. 1693) |
| gctcaatcttcatcttg, | (SEQ ID No. 1694) |
| cagaaacactgttacag, | (SEQ ID No. 1695) |
| cagttgcagaaacactg, | (SEQ ID No. 1696) |
| gtttcagttgcagaaac, | (SEQ ID No. 1697) |
| cttccaccagaggg, | (SEQ ID No. 1698) |
| gtcttccaccagag, | (SEQ ID No. 1699) |
| cttgtcttccaccagag, | (SEQ ID No. 1700) |
| tccttgtcttccac, | (SEQ ID No. 1701) |
| cttccttgtcttccac, | (SEQ ID No. 1702) |
| catcttgtgataggg, | (SEQ ID No. 1703) |
| gctaggtgcagtggt, | (SEQ ID No. 1704) |
| gatggctaggtgca, | (SEQ ID No. 1705) |
| gtggatgatggctag, | (SEQ ID No. 1706) |
| cccgtggatgatgg, | (SEQ ID No. 1707) |
| ctgcccgtggatga, | (SEQ ID No. 1708) |
| agagcctccaccca, | (SEQ ID No. 1709) |
| gttgtactctcgagc, | (SEQ ID No. 1710) |
| cgttgtactctcg, | (SEQ ID No. 1711) |
| cgcgttgtactctc, | (SEQ ID No. 1712) |
| gagtctccatgccg, | (SEQ ID No. 1713) |
| ctgagtctccatgc, | (SEQ ID No. 1714) |
| catggctgagtctc, | (SEQ ID No. 1715) |
| tgcatggctgagtc, | (SEQ ID No. 1716) |
| gcgttcacgttggc, | (SEQ ID No. 1717) |
| gtgcgagcgttcac, | (SEQ ID No. 1718) |
| aggtgcgagcgttc, | (SEQ ID No. 1719) |
| gcaaaggtgcgagc, | (SEQ ID No. 1720) |
| cctggtggctcagg, | (SEQ ID No. 1721) |
| gtcagtcacctgag, | (SEQ ID No. 1722) |
| caggtcagtcacctg, | (SEQ ID No. 1723) |
| cagcaggtcagtcac, | (SEQ ID No. 1724) |
| gcagcaggtcagtc, | (SEQ ID No. 1725) |
| catttagcagcaaggtc, | (SEQ ID No. 1726) |
| gcagcatttagcagc, | (SEQ ID No. 1727) |
| ctgagcagcatttag, | (SEQ ID No. 1728) |
| cccatgagaatcct, | (SEQ ID No. 1729) |
| ccttcccatgagaatcc, | (SEQ ID No. 1730) |
| tcctccccttccca, | (SEQ ID No. 1731) |
| gcctccagtagacc, | (SEQ ID No. 1732) |
| gtcagacagggcct, | (SEQ ID No. 1733) |
| ccatgtcagacagg, | (SEQ ID No. 1734) |
| ggcccatgtcagac, | (SEQ ID No. 1735) |
| gctattcctgaaatcac, | (SEQ ID No. 1736) |
| cctcttgtcttcttacc, | (SEQ ID No. 1737) |
| ggagaagaaacctcttg, | (SEQ ID No. 1738) |
| ccttgctgaagtttctt, | (SEQ ID No. 1739) |
| ccaagactccttgc, | (SEQ ID No. 1740) |
| ccctttcatggagc, | (SEQ ID No. 1741) |
| cctcttggtgtgac, | (SEQ ID No. 1742) |
| gactaaggatgccg, | (SEQ ID No. 1743) |
| gtggcaggactaagg, | (SEQ ID No. 1744) |
| agacgtggcaggac, | (SEQ ID No. 1745) |
| cttccagcaggcag, | (SEQ ID No. 1746) |
| gttcctctgcctgg, | (SEQ ID No. 1747) |
| gatgttcctctgcctg, | (SEQ ID No. 1748) |
| gagatgttcctctgcc, | (SEQ ID No. 1749) |
| gtgagatgttcctctg, | (SEQ ID No. 1750) |
| cagagagtgagatgttcc, | (SEQ ID No. 1751) |
| ccagagagtgagatgttc, | (SEQ ID No. 1752) |
| ggtccagagagtgag, | (SEQ ID No. 1753) |
| gaggtccagagagtg, | (SEQ ID No. 1754) |
| ggtcctgtagtgcc, | (SEQ ID No. 1755) |
| gattttatgatgcaggc, | (SEQ ID No. 1756) |
| gacctgcatcccttattg, | (SEQ ID No. 1757) |
| tagttgattttccagcag, | (SEQ ID No. 1758) |
| gaatctcacgttttgc, | (SEQ ID No. 1759) |
| cagagaaagaatctcacg, | (SEQ ID No. 1760) |
| tttcaccatcagagaaag, | (SEQ ID No. 1761) |
| catttggacatttcacc, | (SEQ ID No. 1762) |
| ccttcatttggacatttc, | (SEQ ID No, 1763) |
| caatgtgcttgatgatcc, | (SEQ ID No. 1764) |
| cgcatcggatttctc, | (SEQ ID No. 1765) |
| caaaccgcatcggatttc, | (SEQ ID No. 1766) |
| gaactgcaaaccgc, | (SEQ ID No. 1767) |
| gcagagaagaactgc, | (SEQ ID No. 1768) |
| gcaagtaaacatggg, | (SEQ ID No. 1769) |
| ggtccacgttttgg, | (SEQ ID No. 1770) |
| gcaagggtccacgttt, | (SEQ ID No. 1771) |
| tggcttcttcttcaggg, | (SEQ ID No. 1772) |
| tcctgctggcttcttc, | (SEQ ID No. 1773) |
| gtcctgctggcttc, | (SEQ ID No. 1774) |
| ggtagtctaggaattgg, | (SEQ ID No. 1775) |
| cttgcaggtagtctagg, | (SEQ ID No. 1776) |
| gaaactcttgcaggtag, | (SEQ ID No. 1777) |
| caccaagaaactcttgc, | (SEQ ID No. 1778) |
| cattacaccaagaaactc, | (SEQ ID No. 1779) |
| ctcggtgttcattacacc, | (SEQ ID No. 1780) |
| ctttctattatccactcg, | (SEQ ID No. 1781) |
| ccagtttagtctcaactt, | (SEQ ID No. 1782) |
| aaccagtttagtctcaac, | (SEQ ID No. 1783) |
| acaaaccagtttagtctc, | (SEQ ID No. 1784) |
| ctcgcgaaaaagtttctt, | (SEQ ID No. 1785) |
| ccctcgcgaaaaagtttc, | (SEQ ID No. 1786) |
| gtccctcgcgaaaaag, | (SEQ ID No. 1787) |
| cagttgaaccgtccc, | (SEQ ID No. 1788) |
| gctttcgaagtttcagtt, | (SEQ ID No. 1789) |
| gatgctttcgaagtttc, | (SEQ ID No. 1790) |
| ctgtctctgcaaataatg, | (SEQ ID No. 1791) |
| cacttattacattcaccc, | (SEQ ID No. 1792) |
| ttttcctccagttcctc, | (SEQ ID No. 1793) |
| ggacaatatgtacaaaactc, | (SEQ ID No. 1794) |
| gttgatgaacatttggac, | (SEQ ID No. 1795) |
| gtgttgatgaacatttgg, | (SEQ ID No. 1796) |
| caaaatttggccaggg, | (SEQ ID No. 1797) |
| gcccaaaatttggcc, | (SEQ ID No. 1798) |
| cccagcccaaaatttgg, | (SEQ ID No. 1799) |
| gtccccagcccaaaatt, | (SEQ ID No. 1800) |
| aaatcgccagaggctg, | (SEQ ID No. 1801) |
| accaaatcgccagagg, | (SEQ ID No. 1802) |
| catcaccaaatcgccag, | (SEQ ID No. 1803) |
| taggagtggttgaggc, | (SEQ ID No. 1804) |
| gtgtaggagtggttgag, | (SEQ ID No. 1805) |
| ctgtgtaggagtgg, | (SEQ ID No. 1806) |
| cccacatgcctgtg, | (SEQ ID No. 1807) |
| cgatgaacaacgag, | (SEQ ID No. 1808) |
| ctggcgatgaacaacg, | (SEQ ID No. 1809) |
| cgctggcgatgaac, | (SEQ ID No. 1810) |
| gagctagtcccgttg, | (SEQ ID No. 1811) |
| gcgaagagctagtcc, | (SEQ ID No. 1812) |
| ccagttatgcgaagagc, | (SEQ ID No. 1813) |
| ccccagttatgcgaag, | (SEQ ID No. 1814) |
| cacatgcttggcgc, | (SEQ ID No. 1815) |
| gatcacatgcttggcg, | (SEQ ID No. 1816) |
| gacaaagagcatgatcac, | (SEQ ID No. 1817) |
| gagtcacagggacaaag, | (SEQ ID No. 1818) |
| gagagtcacagggac, | (SEQ ID No. 1819) |
| gcagagagtcacagg, | (SEQ ID No. 1820) |
| ccatgcagagagtc, | (SEQ ID No. 1821) |
| ccaccatgcagagag, | (SEQ ID No. 1822) |
| tagccacgaccacc, | (SEQ ID No. 1823) |
| gattagctgcccatcctt, | (SEQ ID No. 1824) |
| ggtatagattagctgcc, | (SEQ ID No. 1825) |
| gtatcttctgtgaatggg, | (SEQ ID No. 1826) |
| ctggcccacagtct, | (SEQ ID No. 1827) |
| ctctggcccacagt, | (SEQ ID No. 1828) |
| tgcagggctctctg, | (SEQ ID No. 1829) |
| agtgcagggctctc, | (SEQ ID No. 1830) |
| cactgatcatgatggc, | (SEQ ID No. 1831) |
| gacactgatcatgatggc, | (SEQ ID No. 1832) |
| acaatgacactgatcatg, | (SEQ ID No. 1833) |
| gaaccaccaggaggat, | (SEQ ID No. 1834) |
| gacacaaaacagccact, | (SEQ ID No. 1835) |
| gtggacctttcggac, | (SEQ ID No. 1836) |
| caaccagcatacgaagt, | (SEQ ID No. 1837) |
| tccctctgggcttc, | (SEQ ID No. 1838) |
| actgtccctctggg, | (SEQ ID No. 1839) |
| gactgtccctctgg, | (SEQ ID No. 1840) |
| cctagatgactgtccc, | (SEQ ID No. 1841) |
| cagcgaggatactgc, | (SEQ ID No. 1842) |
| cttcaccagcgaggat, | (SEQ ID No. 1843) |
| tttcctctgggtcttcac, | (SEQ ID No. 1844) |
| ctttcctctgggtcttc, | (SEQ ID No. 1845) |
| ctcccaatccaagtttt, | (SEQ ID No. 1846) |
| ttcatcccggagcc, | (SEQ ID No. 1847) |
| ttcttcatcccggagc, | (SEQ ID No. 1848) |
| gctcagccagttcttc, | (SEQ ID No. 1849) |
| gacagagagggcac, | (SEQ ID No. 1850) |
| cttcacctccgacag, | (SEQ ID No. 1851) |
| gaaaagtctgggcagg, | (SEQ ID No. 1852) |
| gaccctggaacagaaaag, | (SEQ ID No. 1853) |
| ctgaccctggaacag, | (SEQ ID No. 1854) |
| actacaggctgaccct, | (SEQ ID No. 1855) |
| attcactacaggctgacc, | (SEQ ID No. 1856) |
| cgattcactacagg, | (SEQ ID No. 1857) |
| ggccgattcactac, | (SEQ ID No. 1858) |
| cgaacgtctgttggtc, | (SEQ ID No. 1859) |
| cgcgaacgtctgttg, | (SEQ ID No. 1860) |
| cttctgtttgtcgaggat, | (SEQ ID No. 1861) |
| ttcaccaccttctgtttg, | (SEQ ID No. 1862) |
| aggatgcgcttttcattc, | (SEQ ID No. 1863) |
| agcttgcaggatgcg, | (SEQ ID No. 1864) |
| gttgacagcttgcaggat, | (SEQ ID No. 1865) |
| ggaacggaaagttgacag, | (SEQ ID No. 1866) |
| aactcgagtttgacgagg, | (SEQ ID No. 1867) |
| tgtccttgaaggagaac, | (SEQ ID No. 1868) |
| cgtactccatgaccatgt, | (SEQ ID No. 1869) |
| gcacgtactccatgac, | (SEQ ID No. 1870) |
| gattctccggcttcag, | (SEQ ID No. 1871) |
| tcaatgagcagattctcc, | (SEQ ID No. 1872) |
| ggtcaatgagcagattc, | (SEQ ID No. 1873) |
| ccctgctggtcaatg, | (SEQ ID No. 1874) |
| tagccctgctggtc, | (SEQ ID No. 1875) |
| cgcttggcgaaacc, | (SEQ ID No. 1876) |
| ccttcacgcgcttg, | (SEQ ID No. 1877) |
| aaggtccaagtgcg, | (SEQ ID No. 1878) |
| tgccgcacaaggtc, | (SEQ ID No. 1879) |
| ggtgaggaccaccattt, | (SEQ ID No. 1880) |
| gggtgtcacaggtg, | (SEQ ID No. 1881) |
| ataccatcttcttcaggg, | (SEQ ID No. 1882) |
| ggtgataccatcttcttc, | (SEQ ID No. 1883) |
| ccaggtgataccatcttc, | (SEQ ID No. 1884) |
| cctcactgctctggt, | (SEQ ID No. 1885) |
| taagacctcactgc, | (SEQ ID No. 1886) |
| cagagcctaagacctc, | (SEQ ID No. 1887) |
| ccagagcctaagacc, | (SEQ ID No. 1888) |
| tcttcctttttgtgaagc, | (SEQ ID No. 1889) |
| gaccaaattccatcttcc, | (SEQ ID No. 1890) |
| atcagtggaccaaattcc, | (SEQ ID No. 1891) |
| ggttctttctggtccttt, | (SEQ ID No. 1892) |
| tttttgggttctttctgg, | (SEQ ID No. 1893) |
| ggtcttatttttgggttc, | (SEQ ID No. 1894) |
| aatgggcagactctcct, | (SEQ ID No. 1895) |
| tccaccatgacctcaatg, | (SEQ ID No. 1896) |
| aacggcatccaccatg, | (SEQ ID No. 1897) |
| gtgaacggcatccac, | (SEQ ID No. 1898) |
| acttgagcttgtgaacgg, | (SEQ ID No. 1899) |
| ttcatacttgagcttgtg, | (SEQ ID No. 1900) |
| ctggtgtagttttcatac, | (SEQ ID No. 1901) |
| agctgctggtgtagtttt, | (SEQ ID No. 1902) |
| aggaggaccagggt, | (SEQ ID No. 1903) |
| aggtggtccaggag, | (SEQ ID No. 1904) |
| tttctggccaaactgagg, | (SEQ ID No. 1905) |
| ggaggtttctggcc, | (SEQ ID No. 1906) |
| tctggagtggccac, | (SEQ ID No. 1907) |
| cttctggagcatgttgct, | (SEQ ID No. 1908) |
| gccttctggagcatg, | (SEQ ID No. 1909) |
| gtttgtctggccttctg, | (SEQ ID No. 1910) |
| gagtttgtctggccttct, | (SEQ ID No. 1911) |
| ctagagtttgtctggcct, | (SEQ ID No. 1912) |
| gcaagggtaaaattctag, | (SEQ ID No. 1913) |
| agtgcaagggtaaaattc, | (SEQ ID No. 1914) |
| aaacaggcctccact, | (SEQ ID No. 1915) |
| cttggttaattccaatgg, | (SEQ ID No. 1916) |
| aggcaactcccattagtt, | (SEQ ID No. 1917) |
| tactactaaggcacaggg, | (SEQ ID No. 1918) |
| aatactactaaggcacag, | (SEQ ID No. 1919) |
| gtacatcttcaagtcttc, | (SEQ ID No. 1920) |
| ggagtggacatgat, | (SEQ ID No. 1921) |
| aagaagatgaagcctttg, | (SEQ ID No. 1922) |
| ccgtcttactcttcttgg, | (SEQ ID No. 1923) |
| ccgatacaattccaagg, | (SEQ ID No. 1924) |
| ccttttccttctgag, | (SEQ ID No. 1925) |
| ctgttgcaagtacg, | (SEQ ID No. 1926) |
| cagaagcagagggc, | (SEQ ID No. 1927) |
| cctcagaagcagagg, | (SEQ ID No. 1928) |
| ctcctcagaagcag, | (SEQ ID No. 1929) |
| acaggctggtggca, | (SEQ ID No. 1930) |
| ccactctcaaacaggc, | (SEQ ID No. 1931) |
| acggtagccgaagc, | (SEQ ID No. 1932) |
| gacggtagccgaagc, | (SEQ ID No. 1933) |
| ggccagacggtagc, | (SEQ ID No. 1934) |
| gtgtagggccagacggta, | (SEQ ID No. 1935) |
| ccgaagccatttttcagg, | (SEQ ID No. 1936) |
| ccccgaagccatttttc, | (SEQ ID No. 1937) |
| ggttgatgtcgtcc, | (SEQ ID No. 1938) |
| gcttgagacactcgc, | (SEQ ID No. 1939) |
| ccggacccgtccat, | (SEQ ID No. 1940) |
| gcttgctttactgc, | (SEQ ID No. 1941) |
| ggttgctctgagac, | (SEQ ID No. 1942) |
| gccacagtcatgcc, | (SEQ ID No. 1943) |
| cgggcatgctggcg, | (SEQ ID No. 1944) |
| gtgaagttcaggatgatc, | (SEQ ID No. 1945) |
| ccagtgcctcatgg, | (SEQ ID No. 1946) |
| cagtgttctccatgg, | (SEQ ID No. 1947) |
| ctgtaccagaccgag, | (SEQ ID No. 1948) |
| gcatactgtttcagc, | (SEQ ID No. 1949) |
| gccatcagctccttg, | (SEQ ID No. 1950) |
| ccacaccatagatgg, | (SEQ ID No. 1951) |
| gctggagcagtttcc, | (SEQ ID No. 1952) |
| ctcgcttctgctgc, | (SEQ ID No. 1953) |
| accgtggcaaagcg, | (SEQ ID No. 1954) |
| aggtgacaccgtgg, | (SEQ ID No. 1955) |
| gacttgattccttcag, | (SEQ ID No. 1956) |
| ggatttgacttgattcc, | (SEQ ID No. 1957) |
| gctgctgttcatgg, | (SEQ ID No. 1958) |
| ccgtttctttcagtagg, | (SEQ ID No. 1959) |
| cttgaagtaggagc, | (SEQ ID No. 1960) |
| cgctcctacatggc, | (SEQ ID No. 1961) |
| gatgaggtacaggcc, | (SEQ ID No. 1962) |
| gtagatgaggtacag, | (SEQ ID No. 1963) |
| gagtagatgaggtac, | (SEQ ID No. 1964) |
| cctgggagtagatg, | (SEQ ID No. 1965) |
| ggacctgggagtag, | (SEQ ID No. 1966) |
| acatgggtggaggg, | (SEQ ID No. 1967) |
| gtgctcatggtgtc, | (SEQ ID No. 1968) |
| ctttcagtgctcatg, | (SEQ ID No. 1969) |
| tgctttcagtgctca, | (SEQ ID No. 1970) |
| gatgatctgactgcc, | (SEQ ID No. 1971) |
| gttcgagaagatgatc, | (SEQ ID No. 1972) |
| gggttcgagaagatg, | (SEQ ID No. 1973) |
| ggtttgctacaacatg, | (SEQ ID No. 1974) |
| cagcttgagggtttg, | (SEQ ID No. 1975) |
| tgcccctcagcttg, | (SEQ ID No. 1976) |
| gacacacactatctc, | (SEQ ID No. 1977) |
| gcagccatctttattc, | (SEQ ID No. 1978) |
| gttcagcagccatc, | (SEQ ID No. 1979) |
| tggttcagcagcca, | (SEQ ID No. 1980) |
| ctactggttcagcagc, | (SEQ ID No. 1981) |
| tctactggttcagc, | (SEQ ID No. 1982) |
| gccacaaagttgatgc, | (SEQ ID No. 1983) |
| cattgccacaaagttg, | (SEQ ID No. 1984) |
| gagaacttggtcattc, | (SEQ ID No. 1985) |
| ggtcaatgaagagaac, | (SEQ ID No. 1986) |
| cgatttccttggtc, | (SEQ ID No. 1987) |
| ccgatttccttggtc, | (SEQ ID No. 1988) |
| caaatagaggccgatttc, | (SEQ ID No. 1989) |
| caaatagaggccga, | (SEQ ID No. 1990) |
| cctctaggctggct, | (SEQ ID No. 1991) |
| catacctctaggctg, | (SEQ ID No. 1992) |
| agccatacctctag, | (SEQ ID No. 1993) |
| cagccatacctctag, | (SEQ ID No. 1994) |
| cacagagatagttacag, | (SEQ ID No. 1995) |
| gtcttcgttttgaacag, | (SEQ ID No. 1996) |
| ctagtcttcgttttgaac, | (SEQ ID No. 1997) |
| tagctagtcttcgttttg, | (SEQ ID No. 1998) |
| gagccactgcgcc, | (SEQ ID No. 1999) |
| cgtgagccactgcg, | (SEQ ID No. 2000) |
| cgtaacgatcactgg, | (SEQ ID No. 2001) |
| gcactcgtaacgatc, | (SEQ ID No. 2002) |
| ggagcactcgtaac, | (SEQ ID No. 2003) |
| catcatcctgaggt, | (SEQ ID No. 2004) |
| cagtatcatcatcctg, | (SEQ ID No. 2005) |
| ctcagtatcatcatcc, | (SEQ ID No. 2006) |
| ctaaaagtatgtgccatc, | (SEQ ID No. 2007) |
| cacatcgcctctct, | (SEQ ID No. 2008) |
| gcttcacagtcacatcgc, | (SEQ ID No. 2009) |
| ggaaggcttcacagtc, | (SEQ ID No. 2010) |
| cctgtgacttgagaattg, | (SEQ ID No. 2011) |
| ggaagacctgtgac, | (SEQ ID No. 2012) |
| ctctgctccacatatttg, | (SEQ ID No. 2013) |
| caacgaagatctctg, | (SEQ ID No. 2014) |
| caacaccaacgaag, | (SEQ ID No. 2015) |
| ggtcttctgtttgc, | (SEQ ID No. 2016) |
| cgatgaagtggtaggaag, | (SEQ ID No. 2017) |
| ggttgcatggaagc, | (SEQ ID No. 2018) |
| ggtcacaaacttgcc, | (SEQ ID No. 2019) |
| ctgatttggtccactag, | (SEQ ID No. 2020) |
| catgttagcactgttc, | (SEQ ID No. 2021) |
| ggtcttgatgtactcc, | (SEQ ID No. 2022) |
| ccacctaaagagagatc, | (SEQ ID No. 2023) |
| cttgtactgcaccatc, | (SEQ ID No. 2024) |
| gccagttaagaagatg, | (SEQ ID No. 2025) |
| gagatcatgatccatgg, | (SEQ ID No. 2026) |
| gtagtgtcccaatagtg, | (SEQ ID No. 2027) |
| cttcctcatcattccc, | (SEQ ID No. 2028) |
| cacaagcttttcgac, | (SEQ ID No. 2029) |

### Example 14

### Combination Of a 5′- and 3′-End PEG Modified Conjugate with a Third Component Penetratin

[0123] Starting product was a pyridyl-activated 5′-/3′-end PEG modified oligonucleotide, wherein the 5′-end was modified via native ligation, which is described as mPEG400-NH-Cys(SPy)-Oligo-NH-mPEG1000. The oligonucleotides connected to penetratin were selected from the group consisting of sequences of FIG. 1 and Example 13, preferably of SEQ ID No. 2030, 2031, 2032, 2057, 2066, and 2461.

[0124] Penetratin had the following sequence: H₂N-RQIKIWFQNRRMKWKKC-COOH, wherein the cysteine at the C-terminus was additionally added to improve the connection between penetratin and the native ligation site of mPEG400-NH-Cys(SPy)-Oligo-NH-mPEG1000.

[0125] 20 nmol of mPEG400-NH-Cys(SPy)-Oligo-NH-mPEG1000 were dissolved in formamide to a final oligonucleotide concentration of 0.05 nmol/μl (0.05 mM), which was added to 1 nmol penetration. The mixture of mPEG400-NH-Cys(SPy)-Oligo-NH-mPEG1000 and penetratin was incubated at 37° C. for 30 min, and afterwards purified via anion exchange column and a reverse phase HPLC. The results are shown in FIG. 13A to C, wherein the oligonucleotide of SEQ ID No. 2461 was the selected.

[0126] Using the same, above mentioned conditions, a PEG-modified oligonucleotide of SEQ ID No. 2030 was connected to penetration via the native ligation site. SEQ ID No. 2030 like SEQ ID No. 2461 show a highly efficient combination with penetratin. The results for SEQ ID No. 2030 are shown in FIG. 13A to C and 14A to C.

[0127] The final products mPEG400-Cys(S-Pen)-Oligo-NH-mPEG1000 were confirmed in a MALDI-TOF MS having a matrix of 2,6 dihydroxyacetophenone (DHAP) and diammoniumhydrogencitrate.

### Example 15

### Combination of a 5′- and 3′-End PEG Modified Conjugate and the RGDC Peptide

[0128] Starting product was a pyridyl-activated 5′-/3′-end PEG modified oligonucleotide, wherein the 5′-end was modified via native ligation, which is described as mPEG400-Cys(SPy)-Oligo-mPEG1000. The oligonucleotides connected to RGDC were selected from the group consisting of sequences of FIG. 1 and Example 13, preferably of SEQ ID No. 2030, 2031, 2032, 2057, 2066, and 2461.

[0129] The activated RGDC peptide comprises an additional C-terminal cysteine and had the following sequence: H₂N-RGDC-COOH.

[0130] 50 nmol of mPEG400-Cys(SPy)-Oligo-mPEG1000 were dissolved in 0.1 M TEAA buffer, pH 7.5 to a final oligonucleotide concentration of 0.05 nmol/μl (0.05 mM). An aqeuous solution of RGDC peptide (10 nmol/μl) was added to the modified oligonucleotide in a 0.5×, 2×, 8×, and 16× excess. The mixture of mPEG400-Cys(SPy)-Oligo-mPEG1000 and RGDC peptide was incubated at 37° C. for 1 h, and afterwards purified via reverse phase HPLC. The results are shown in FIG. 16A to C for an oligonucleotide of SEQ ID No. 2030.

[0131] The final product mPEG400-Cys(S-CDGR)-Oligo-mPEG1000 was confirmed in a MALDI-TOF MS having a matrix of 2,6 dihydroxyacetophenone (DHAP) and diammoniumhydrogencitrate.

### Example 16

### Effects of PEG- and RGD-Modified Oligonucleotides on Glioblastoma Cells

[0132] The commercially available human glioblastoma cell line A-172 (Accession no. CRL-1620) was established from a 53-year old man with a glioblastoma by Giard in the year 1973.

[0133] A-172 cells were obtained from Cell Lines Service (CLS). These adherent cells were grown in monolayers.

[0134] A-172 glioblastoma cells (7000 cells/well; three wells for each condition) were seeded in growth medium (DMEM-medium supplemented with 10% fetal bovine serum) in 48-well tissue culture plates and cultivated at 37° C. in 5% CO₂ atmosphere with a relative humidity >90%.

[0135] 6 hours after cell seeding, the supernatants were removed and replaced by treatment solution consisting of growth medium (untreated cells) or growth medium supplemented with 0 μM, 0.25 μM, 0.5 μM, 1 μM, 2.5 μM, 5 μM, or 10 μM of AP12009 or derivative #26, or #28. Derivative #26 is 5′-/3′-end PEG modified AP12009 via native ligation, i.e., mPEG400-AP12009-mPEG1000 and derivative #28 is 5′-/3′-end PEG modified AP 12009 connected to RGD at the native ligation site, i.e., mPEG400-Cys(S-CDGR)-AP12009-mPEG1000.

[0136] Replacement of treatment solutions was repeated 2 days and 4 days after the first treatment. On day 7 supernatants were collected, cleared of cellular components by centrifugation (300×g, 5 min, ambient temperature), and frozen immediately at −20° C. Cell number was determined using for example the CyQuant Direct Cell Proliferation Assay kit (Invitrogen (Karlsruhe, Germany) according to the instructions of the manufacturer.

[0137] Secreted TGF-beta2 was measured using for example the Quantikinea Human TGF-R2-ELISA Kit, (R&D Systems) according to the instructions of the manufacturer.

[0138] Derivative #26 (light grey column) is more effective than AP12009 (black column) at 1 and 2.5 μM in suppressing TGF-beta2 expression as shown in FIG. 17A. Derivative #28 (dark grey column) is even more effective than derivative #26 in suppressing TGF-beta2 expression, especially at lower concentration ranges, e.g., 0.5 μM. In the concentration range of 0 to 10 μM AP12009, derivative #26, or derivative #28 have almost no effect on the proliferation of these cells as shown in FIG. 17B. The comparison of proliferation and TGF-beta suppression indicates a specific TGF-beta suppression independent from proliferation.

### Example 17

### Combination of a 5′- and 3′-end PEG modified conjugate and Fluorescein

[0139] Starting product was a 5′-/3′-end PEG modified oligonucleotide, wherein the 5′-end was modified via native ligation, which is described as mPEG400-Cys(SPy)-Oligo-mPEG1000. The oligonucleotides connected to RGDC were selected from the group consisting of sequences of FIG. 1 and Example 13, preferably of SEQ ID No. 2030, 2031, 2032, 2057, 2066 and 2461.

[0140] 43 nmol of mPEG400-Cys(SPy)-Oligo-mPEG1000 were dissolved in 50 mM Tris/150 mM NaCl/5 mM EDTA pH 8.5 resulting in an oligonucleotide concentration of 0.25 nmol/μl. 129 nmol Fluorescein-Iodoacetat in 50 mM Tris/150 mM NaCl/5 mM EDTA pH 8.5 were added to the modified oligonucleotide and incubated for 30 min. at room temperature. Afterwards the samples were purified via reverse phase HPLC. The results are shown in FIG. 19 for an oligonucleotide of SEQ ID No. 2030.

[0141] The final product mPEG400-Cys(S-Fluorescein)-Oligo-mPEG1000 was confirmed in a MALDI-TOF MS having a matrix of 2,6 dihydroxyacetophenone (DHAP) and diammoniumhydrogencitrate.

1. A method for producing a modified oligonucleotide, wherein at least one polymer, preferably polyalkylene oxide, and/or a compound is covalently bound to the 5′-end or the 3′-end of the oligonucleotide via native ligation forming a native ligation site, with the proviso that the polymer and/or the compound is not a protein or peptide, if only the 5′-end of the oligonucleotide is modified by binding of the polymer or compound via native ligation.

2. A method according to claim 1, wherein a further polymer and/or compound is bound to the native ligation site and/or the 3′-end of the 5′-end native ligation modified oligonucleotide, or to the ligation site and/or the 5′-end of the 3′-end native ligation modified oligonucleotide.

3. A method according to claim 1, wherein the 5′-end or the 3′-end of the oligonucleotide is bound to a polymer and/or a compound via native ligation in a first step, the free 3′-end or the free 5′-end of the oligonucleotide is bound to a polymer and/or a compound in a second step, and the native ligation site is optionally bound to a polymer and/or a compound in a third step, or wherein the 5′-end or the 3′-end of the oligonucleotide is bound to a polymer and/or a compound via native ligation in a first step, the native ligation site is bound to a polymer and/or a compound in a second step and the free 3′-end or the free 5′-end of the oligonucleotide is optionally bound to a polymer and/or a compound in a third step, or
wherein the 3′-end or the 5′-end of the oligonucleotide is bound to a polymer and/or a compound in a first step, the free 5′-end or the free 3′-end of the oligonucleotide is bound to a polymer and/or a compound via native ligation in a second step, and the ligation site is optionally bound to a polymer and/or a compound in a third step.

4. A method according to claim 1, wherein the antisense oligonucleotide is a TGF-β2, TGF-β1, TGF-β3, VEGF, IL-10, c-jun, c-fos, c-erbb2 (Her-2), or MIA antisense oligonucleotide and/or an antisense oligonucleotide hybridizing with one or more of the receptors of TGF-β2, TGF-β1, TGF-β3, VEGF, IL-10, c-jun, c-fos, c-erbb2 (Her-2), or MIA.

5. A method according to claim 1, wherein the polymer is polyethylene glycol, preferably, PEG-400, PEG-1000, PEG-2000, PEG-5000, or PEG10000.

6. A method according to claim 1, wherein the compound is a small molecule, an antibody, an antigen, an enzyme, a part of an antibody, or an enzyme, any peptide, e.g., an internalizing peptide, an aptamer, a spiegelmer, RNAi, shRNA, miRNA a chromophor, a marker, biotin, a hormone, a signal peptide, a lipid, a fatty acid, a sugar, an amino acid, a receptor, a part of a receptor, or any ligand of a receptor or binding molecule.

7. A method according to claim 1, wherein the polymer and/or compound is bound to the oligonucleotide, with or without a linker.

8. A method according to claim 7, wherein the linker is a reversible or irreversible linker.

9. A method according to claim 1, wherein the modified oligonucleotide is bound to a solid support via the 5′- and/or 3′-end of the oligonucleotide and/or the ligation site.

10. An oligonucleotide modified via native ligation, comprising a polymer and/or a compound at the 5′- and/or 3′-end of the oligonucleotide and/or at the ligation site with the proviso that the polymer and/or the compound is not a protein or peptide, if only the 5′-end of the oligonucleotide is modified by binding of the polymer or compound via native ligation.

11. The oligonucleotide according to claim 10 for use in preventing and/or treating a tumor, formation of metastasis, an immune disease or disorder, a cardiovascular disease or disorder, and/or a viral disease or disorder.

12. The oligonucleotide according to claim 11, wherein the tumor is selected from the group consisting of solid tumors, blood born tumors, leukemias, tumor metastasis, hemangiomas, acoustic neuromas, neurofibromas, trachomas, pyogenic, granulomas, psoriasis, astracytoma, acoustic neuroma, blastoma, Ewing's tumor, craniopharyngloma, ependymoma, medulloblastoma, glioma, hemangloblastoma, Hodgkins-lymphoma, medullablastoma, leukaemia, mesothelioma, neuroblastoma, neurofibroma, non-Hodgkins lymphoma, pinealoma, retinoblastoma, sarcoma, seminoma, trachomas, Wilm's tumor, bile duct carcinoma, bladder carcinoma, brain tumor, breast cancer, bronchogenic carcinoma, carcinoma of the kidney, cervical cancer, choriocarcinoma, cystadenocarcinome, embryonal carcinoma, epithelial carcinoma, esophageal cancer, cervical carcinoma, colon carcinoma, colorectal carcinoma, endometrial cancer, gallbladder cancer, gastric cancer, head cancer, liver carcinoma, lung carcinoma, medullary carcinoma, neck cancer, non-small-cell bronchogenic/lung carcinoma, ovarian cancer, pancreas carcinoma, papillary carcinoma, papillary adenocarcinoma, prostata cancer, small intestine carcinoma, prostate carcinoma, rectal cancer, renal cell carcinoma, skin cancer, small-cell bronchogenic/lung carcinoma, squamous cell carcinoma, sebaceous gland carcinoma, testicular carcinoma, and uterine cancer, and/or
the immune disease or disorder is selected from the group consisting of diabetes mellitus, arthritis, including rheumatoid arthritis, juvenile rheumatoid arthritis, osteoarthritis, psoriac athritis; multiple sclerosis, encephalomyelitis, myasthenia gravis, systemic lupus erythrematosis, autoimmunethyroiditis, dermatitis, including atopis dermatitis, eczematous dermatitis; psoriasis, Sjogren's Syndrome, Crohn's disease, aphthous ulcer, irits, conjunctivitis, keratoconjunctivitis, ulcerative colitis, asthma, allergic asthma, cutaneous lupus erythematosus, scleroderma, vaginitis, proctitis, drug eruptions, leprosy reversal reactions, erythema nodosum leprosum, autoimmune uveitis, allergic encephalomyelitis, acute necrotizing hemorrhagic encephalopathy, idiopathic bilateral progressive sensorineural hearing loss, aplastic anemia, pure red cell anemia, idiopathic thrombocytopenia, polychondritis, Wegener's granulomatosis, chronic active hepatitis, Stevens-Johnson syndrome, idiopathic sprue, lichen planus, Graves' disease, sarcoidosis, primary billiary cirrhosis, uveitis posterior, and interstitial lung fibrosis, graft-versus-host disease, cases of transplantation, and allergy such as an atopic allergy, and/or
the cardiovascular disease or disorder is selected from the group consisting of hypertension, atherosclerosis, coronary artery spasm, congestive heart failure, coronary artery disease, valvular disease, arrhythmias, and cardiomyopathies, and/or
the viral disease or disorder is selected from the group consisting of hepatitis A (HVA), hepatitis B (HVB), hepatitis C(HVC), or caused by herpes simplex virus (HSV), HIV, FIV, poliovirus, influenza virus, adenoviruses, papillomaviruses, Epstein-Barr-viruses and small pox virus, or virus-associated cancer.

13. A method for preventing and/or treating a tumor, formation of metastasis, an immune disease or disorder, a cardiovascular disease or disorder, and/or a viral disease or disorder by administration of the oligonucleotide according to claim 10.

14. A pharmaceutical composition comprising the modified oligonucleotide according to claim 10, and optionally a pharmaceutically acceptable carrier with the proviso that the polymer and/or the compound is not a protein or peptide, if only the 5′-end of the oligonucleotide is modified by binding of the polymer or compound via native ligation.

15. The pharmaceutical composition according to claim 14 further comprising a cytokine and/or a chemotherapeutic.

The application's sequence listing, which the Patent Office published only in electronic form, follows.

SEQUENCE LISTING (2461 sequences)

SEQ ID NO: 1 - DNA, 20 bp, Artificial Sequence
  Antisense nucleotide
gtgccatcaatacctgcaaa

SEQ ID NO: 2 - DNA, 20 bp, Artificial Sequence
  Antisense nucleotide
catcagttacatcgaaggag

SEQ ID NO: 3 - DNA, 20 bp, Artificial Sequence
  Antisense nucleotide
tcttgggacacgcagcaagg

SEQ ID NO: 4 - DNA, 20 bp, Artificial Sequence
  Antisense nucleotide
gaaatcaatgtaaagtggac

SEQ ID NO: 5 - DNA, 20 bp, Artificial Sequence
  Antisense nucleotide
catgaactggtccatatcga

SEQ ID NO: 6 - DNA, 20 bp, Artificial Sequence
  Antisense nucleotide
gaggttctaaatcttgggac

SEQ ID NO: 7 - DNA, 20 bp, Artificial Sequence
  Antisense nucleotide
gcactctggcttttgggttc

SEQ ID NO: 8 - DNA, 20 bp, Artificial Sequence
  Antisense nucleotide
tagctcaatccgttgttcag

SEQ ID NO: 9 - DNA, 20 bp, Artificial Sequence
  Antisense nucleotide
ccctagatccctcttgaaat

SEQ ID NO: 10 - DNA, 20 bp, Artificial Sequence
  Antisense nucleotide
accaaggctctcttatgttt

SEQ ID NO: 11 - DNA, 20 bp, Artificial Sequence
  Antisense nucleotide
tcgagtgtgctgcaggtaga

SEQ ID NO: 12 - DNA, 20 bp, Artificial Sequence
  Antisense nucleotide
tgaacagcatcagttacatc

SEQ ID NO: 13 - DNA, 20 bp, Artificial Sequence
  Antisense Nucleotide
gctgggttggagatgttaaa

SEQ ID NO: 14 - DNA, 20 bp, Artificial Sequence
  Antisense nucleotide
agaggttctaaatcttggga

SEQ ID NO: 15 - DNA, 20 bp, Artificial Sequence
  Antisense Nucleotide
cgccggttggtctgttgtga

SEQ ID NO: 16 - DNA, 20 bp, Artificial Sequence
  Antisense Nucleotide
ctgctttcaccaaattggaa

SEQ ID NO: 17 - DNA, 20 bp, Artificial Sequence
  Antisense nucleotide
aagtatagatcaaggagagt

SEQ ID NO: 18 - DNA, 20 bp, Artificial Sequence
  Antisense nucleotide
tgctcaggatctgcccgcgg

SEQ ID NO: 19 - DNA, 20 bp, Artificial Sequence
  Antisense nucleotide
gtgctgttgtagatggaaat

SEQ ID NO: 20 - DNA, 20 bp, Artificial Sequence
  Antisense nucleotide
agggcggcatgtctattttg

SEQ ID NO: 21 - DNA, 20 bp, Artificial Sequence
  Antisense nucleotide
taagcttattttaaatccca

SEQ ID NO: 22 - DNA, 20 bp, Artificial Sequence
  Antisense nucleotide
tagctgcatttgcaagactt

SEQ ID NO: 23 - DNA, 20 bp, Artificial Sequence
  Antisense nucleotide
tctgttgtgactcaagtctg

SEQ ID NO: 24 - DNA, 20 bp, Artificial Sequence
  Antisense nucleotide
aagcaataggccgcatccaa

SEQ ID NO: 25 - DNA, 20 bp, Artificial Sequence
  Antisense nucleotide
tcaatgtaaagtggacgtag

SEQ ID NO: 26 - DNA, 20 bp, Artificial Sequence
  Antisense nucleotide
attttagctgcatttgcaag

SEQ ID NO: 27 - DNA, 20 bp, Artificial Sequence
  Antisense nucleotide
tgtagatggaaatcacctcc

SEQ ID NO: 28 - DNA, 20 bp, Artificial
  Antisense nucleotide
ttaacactgatgaaccaagg

SEQ ID NO: 29 - DNA, 20 bp, Artificial Sequence
  Antisense nucleotide
attgtaccctttgggttcgt

SEQ ID NO: 30 - DNA, 20 bp, Artificial Sequence
  Antisense nucleotide
agatccctcttgaaatcaat

SEQ ID NO: 31 - DNA, 20 bp, Artificial Sequence
  Antisense nucleotide
tgtaaagtggacgtaggcag

SEQ ID NO: 32 - DNA, 20 bp, Artificial Sequence
  Antisense nucleotide
ccattcgccttctgctcttg

SEQ ID NO: 33 - DNA, 20 bp, Artificial Sequence
  Antisense nucleotide
tgttaaatctttggacttga

SEQ ID NO: 34 - DNA, 20 bp, Artificial Sequence
  Antisense nucleotide
gaagggcggcatgtctattt

SEQ ID NO: 35 - DNA, 20 bp, Artificial Sequence
  Antisense nucleotide
gaccctgctgtgctgagtgt

SEQ ID NO: 36 - DNA, 20 bp, Artificial Sequence
  Antisense nucleotide
gaactagtaccgccttttca

SEQ ID NO: 37 - DNA, 20 bp, Artificial Sequence
  Antisense nucleotide
cgatcctcttgcgcatgaac

SEQ ID NO: 38 - DNA, 20 bp, Artificial Sequence
  Antisense nucleotide
ccggccaaaagggaagagat

SEQ ID NO: 39 - DNA, 20 bp, Artificial Sequence
  Antisense nucleotide
aaagagacgagtggctatta

SEQ ID NO: 40 - DNA, 20 bp, Artificial Sequence
  Antisense nucleotide
aagtggaaatattaatacgg

SEQ ID NO: 41 - DNA, 20 bp, Artificial Sequence
  Antisense nucleotide
agatcaaggagagttgtttg

SEQ ID NO: 42 - DNA, 20 bp, Artificial Sequence
  Antisense nucleotide
agttgtttttaaaagtcaga

SEQ ID NO: 43 - DNA, 20 bp, Artificial Sequence
  Antisense nucleotide
tgtaacaactgggcagacag

SEQ ID NO: 44 - DNA, 20 bp, Artificial Sequence
  Antisense nucleotide
ggtgttgtaacaactgggca

SEQ ID NO: 45 - DNA, 20 bp, Artificial Sequence
  Antisense nucleotide
tacccacagagcacctggga

SEQ ID NO: 46 - DNA, 20 bp, Artificial Sequence
  Antisense nucleotide
gggatggcatcaaggtaccc

SEQ ID NO: 47 - DNA, 20 bp, Artificial Sequence
  Antisense nucleotide
tcgtcatcatcattatcatc

SEQ ID NO: 48 - DNA, 20 bp, Artificial
  Antisense nucleotide
aagggtgcctattgcatagc

SEQ ID NO: 49 - DNA, 20 bp, Artificial Sequence
  Antisense nucleotide
ctcactgttaactctaagag

SEQ ID NO: 50 - DNA, 20 bp, Artificial Sequence
  Antisense nucleotide
gcaaagtatttggtctccac

SEQ ID NO: 51 - DNA, 20 bp, Artificial Sequence
  Antisense nucleotide
caagttccttaagccatcca

SEQ ID NO: 52 - DNA, 20 bp, Artificial Sequence
  Antisense nucleotide
ttatcttaatgcagactttc

SEQ ID NO: 53 - DNA, 20 bp, Artificial Sequence
  Antisense nucleotide
cttacaagaagcttccttag

SEQ ID NO: 54 - DNA, 20 bp, Artificial Sequence
  Antisense nucleotide
actggtgagcttcagcttgc

SEQ ID NO: 55 - DNA, 20 bp, Artificial Sequence
  Antisense nucleotide
acttgagaatctgatatagc

SEQ ID NO: 56 - DNA, 20 bp, Artificial Sequence
  Antisense nucleotide
aggttcctgtctttatggtg

SEQ ID NO: 57 - DNA, 20 bp, Artificial Sequence
  Antisense nucleotide
gtgtatccatttccacccta

SEQ ID NO: 58 - DNA, 20 bp, Artificial Sequence
  Antisense nucleotide
cagcacagaagttggcattg

SEQ ID NO: 59 - DNA, 20 bp, Artificial Sequence
  Antisense nucleotide
gcaaggagaagcagatgctt

SEQ ID NO: 60 - DNA, 20 bp, Artificial Sequence
  Antisense nucleotide
agcaaggagaagcagatgct

SEQ ID NO: 61 - DNA, 20 bp, Artificial Sequence
  Antisense nucleotide
ttttccaagaattttagctg

SEQ ID NO: 62 - DNA, 20 bp, Artificial Sequence
  Antisense nucleotide
ttcttgttacaagcatcatc

SEQ ID NO: 63 - DNA, 20 bp, Artificial Sequence
  Antisense nucleotide
ttaaagaaggagcggttcgg

SEQ ID NO: 64 - DNA, 20 bp, Artificial Sequence
  Antisense nucleotide
ctgggctgaaatttatatat

SEQ ID NO: 65 - DNA, 20 bp, Artificial Sequence
  Antisense nucleotide
gggcagacagctaggagttt

SEQ ID NO: 66 - DNA, 20 bp, Artificial Sequence
  Antisense nucleotide
gtgtactcaccaaggtaccc

SEQ ID NO: 67 - DNA, 20 bp, Artificial Sequence
  Antisense nucleotide
cccagcactttgggaggccg

SEQ ID NO: 68 - DNA, 20 bp, Artificial Sequence
  Antisense nucleotide
ggctcacgcctgtaatccca

SEQ ID NO: 69 - DNA, 20 bp, Artificial Sequence
  Antisense nucleotide
tgaccgtgaactcactattt

SEQ ID NO: 70 - DNA, 20 bp, Artificial Sequence
  Antisense nucleotide
atagtggtgatggctataca

SEQ ID NO: 71 - DNA, 20 bp, Artificial Sequence
  Antisense nucleotide
ttttggttacctgcaaatct

SEQ ID NO: 72 - DNA, 20 bp, Artificial Sequence
  Antisense nucleotide
gaacactcaccctgctgtgc

SEQ ID NO: 73 - DNA, 20 bp, Artificial Sequence
  Antisense nucleotide
gaatggctctttaaacccta

SEQ ID NO: 74 - DNA, 20 bp, Artificial Sequence
  Antisense nucleotide
gaagaaatggagttcagtgt

SEQ ID NO: 75 - DNA, 20 bp, Artificial Sequence
  Antisense nucleotide
tttctcctggaagggagagg

SEQ ID NO: 76 - DNA, 20 bp, Artificial Sequence
  Antisense nucleotide
aaatgcaacgcgttcccaac

SEQ ID NO: 77 - DNA, 20 bp, Artificial Sequence
  Antisense nucleotide
aatacgaaacttttgcaaag

SEQ ID NO: 78 - DNA, 20 bp, Artificial Sequence
  Antisense nucleotide
actagtaattctcagagcgg

SEQ ID NO: 79 - DNA, 20 bp, Artificial Sequence
  Antisense nucleotide
aagaaactagtaattctcag

SEQ ID NO: 80 - DNA, 20 bp, Artificial Sequence
  Antisense nucleotide
agtgcatgtttttaaaagga

SEQ ID NO: 81 - DNA, 20 bp, Artificial Sequence
  Antisense nucleotide
cagtagtgcatgtttttaaa

SEQ ID NO: 82 - DNA, 20 bp, Artificial Sequence
  Antisense nucleotide
ctcagcacacagtagtgcat

SEQ ID NO: 83 - DNA, 20 bp, Artificial Sequence
  Antisense nucleotide
agatgcaggagcaaaaaggt

SEQ ID NO: 84 - DNA, 20 bp, Artificial
  Antisense nucleotide
caggtagacagactgagcgc

SEQ ID NO: 85 - DNA, 20 bp, Artificial Sequence
  Antisense nucleotide
gcctcgatcctcttgcgcat

SEQ ID NO: 86 - DNA, 20 bp, Artificial Sequence
  Antisense nucleotide
gcggatggcctcgatcctct

SEQ ID NO: 87 - DNA, 20 bp, Artificial Sequence
  Antisense nucleotide
ctcaggatctgcccgcggat

SEQ ID NO: 88 - DNA, 20 bp, Artificial Sequence
  Antisense nucleotide
gctccggatagtcttccggg

SEQ ID NO: 89 - DNA, 20 bp, Artificial Sequence
  Antisense nucleotide
agatggaaatcacctccggg

SEQ ID NO: 90 - DNA, 20 bp, Artificial Sequence
  Antisense nucleotide
gttgtagatggaaatcacct

SEQ ID NO: 91 - DNA, 20 bp, Artificial Sequence
  Antisense nucleotide
ctggtactgttgtagatgga

SEQ ID NO: 92 - DNA, 20 bp, Artificial Sequence
  Antisense nucleotide
aggcggctgccctccggctt

SEQ ID NO: 93 - DNA, 20 bp, Artificial Sequence
  Antisense nucleotide
aacctccttggcgtagtact

SEQ ID NO: 94 - DNA, 20 bp, Artificial Sequence
  Antisense nucleotide
attttataaacctccttggc

SEQ ID NO: 95 - DNA, 20 bp, Artificial Sequence
  Antisense nucleotide
cggcatgtcgattttataaa

SEQ ID NO: 96 - DNA, 20 bp, Artificial Sequence
  Antisense nucleotide
cgggatggcattttcggagg

SEQ ID NO: 97 - DNA, 20 bp, Artificial Sequence
  Antisense nucleotide
gtagggtctgtagaaagtgg

SEQ ID NO: 98 - DNA, 20 bp, Artificial Sequence
  Antisense nucleotide
tgaagtagggtctgtagaaa

SEQ ID NO: 99 - DNA, 20 bp, Artificial Sequence
  Antisense nucleotide
attctgaagtagggtctgta

SEQ ID NO: 100 - DNA, 20 bp, Artificial Sequence
  Antisense nucleotide
aagcggacgattctgaagta

SEQ ID NO: 101 - DNA, 20 bp, Artificial Sequence
  Antisense nucleotide
cccaggttcctgtctttgtg

SEQ ID NO: 102 - DNA, 20 bp, Artificial Sequence
  Antisense nucleotide
ggcagtgtaaacttatttta

SEQ ID NO: 103 - DNA, 20 bp, Artificial Sequence
  Antisense nucleotide
ccatcaatacctgcaaatct

SEQ ID NO: 104 - DNA, 20 bp, Artificial Sequence
  Antisense nucleotide
aggtgccatcaatacctgca

SEQ ID NO: 105 - DNA, 20 bp, Artificial Sequence
  Antisense nucleotide
agttttctgatcaccactgg

SEQ ID NO: 106 - DNA, 20 bp, Artificial Sequence
  Antisense nucleotide
ttatagttttctgatcacca

SEQ ID NO: 107 - DNA, 20 bp, Artificial Sequence
  Antisense nucleotide
cctagtggactttatagttt

SEQ ID NO: 108 - DNA, 20 bp, Artificial Sequence
  Antisense nucleotide
acattagcaggagatgtggg

SEQ ID NO: 109 - DNA, 20 bp, Artificial
  Antisense nucleotide
agggcaacaacattagcagg

SEQ ID NO: 110 - DNA, 20 bp, Artificial Sequence
  Antisense nucleotide
actccagtctgtaggagggc

SEQ ID NO: 111 - DNA, 20 bp, Artificial Sequence
  Antisense nucleotide
tcctgcacatttctaaagca

SEQ ID NO: 112 - DNA, 20 bp, Artificial Sequence
  Antisense nucleotide
cagcaattatcctgcacatt

SEQ ID NO: 113 - DNA, 20 bp, Artificial Sequence
  Antisense nucleotide
atgtaaagagggcgaaggca

SEQ ID NO: 114 - DNA, 20 bp, Artificial Sequence
  Antisense nucleotide
ctcttaaaatcaatgtaaag

SEQ ID NO: 115 - DNA, 20 bp, Artificial Sequence
  Antisense nucleotide
ccaagatccctcttaaaatc

SEQ ID NO: 116 - DNA, 20 bp, Artificial Sequence
  Antisense nucleotide
cctttgggttcatggatcca

SEQ ID NO: 117 - DNA, 20 bp, Artificial Sequence
  Antisense nucleotide
gcattgtaccctttgggttc

SEQ ID NO: 118 - DNA, 20 bp, Artificial Sequence
  Antisense nucleotide
gcacagaagttagcattgta

SEQ ID NO: 119 - DNA, 20 bp, Artificial Sequence
  Antisense nucleotide
ctgaggactttggtgtgttg

SEQ ID NO: 120 - DNA, 20 bp, Artificial Sequence
  Antisense nucleotide
tcctgggacacacagcaagg

SEQ ID NO: 121 - DNA, 20 bp, Artificial Sequence
  Antisense nucleotide
tttagctgcatttacaagac

SEQ ID NO: 122 - DNA, 20 bp, Artificial Sequence
  Antisense nucleotide
caaggactttagctgcattt

SEQ ID NO: 123 - DNA, 20 bp, Artificial Sequence
  Antisense nucleotide
gtcattgtcaccgtgatttt

SEQ ID NO: 124 - DNA, 20 bp, Artificial Sequence
  Antisense nucleotide
ccagttttaacaaacagaac

SEQ ID NO: 125 - DNA, 20 bp, Artificial Sequence
  Antisense nucleotide
agatgccagttttaacaaac

SEQ ID NO: 126 - DNA, 20 bp, Artificial Sequence
  Antisense nucleotide
gttcattatatagtaacaca

SEQ ID NO: 127 - DNA, 20 bp, Artificial Sequence
  Antisense nucleotide
atgaaaggttcattatatag

SEQ ID NO: 128 - DNA, 20 bp, Artificial Sequence
  Antisense nucleotide
ttccaagggtaatgaaaggt

SEQ ID NO: 129 - DNA, 20 bp, Artificial Sequence
  Antisense nucleotide
cttaagccatccatgagttt

SEQ ID NO: 130 - DNA, 20 bp, Artificial Sequence
  Antisense nucleotide
cctggcttatttgagttcaa

SEQ ID NO: 131 - DNA, 20 bp, Artificial Sequence
  Antisense nucleotide
ttagtcctataacaactcac

SEQ ID NO: 132 - DNA, 20 bp, Artificial Sequence
  Antisense nucleotide
gcaaagaaccatttacaatt

SEQ ID NO: 133 - DNA, 20 bp, Artificial Sequence
  Antisense nucleotide
cttgcttaaactggcaaaga

SEQ ID NO: 134 - DNA, 20 bp, Artificial Sequence
  Antisense nucleotide
acatgtaaagtagttactgt

SEQ ID NO: 135 - DNA, 20 bp, Artificial Sequence
  Antisense nucleotide
acacattacatgtaaagtag

SEQ ID NO: 136 - DNA, 20 bp, Artificial Sequence
  Antisense nucleotide
taagatctacacattacatg

SEQ ID NO: 137 - DNA, 20 bp, Artificial Sequence
  Antisense nucleotide
attcaaaggtactggccagc

SEQ ID NO: 138 - DNA, 20 bp, Artificial Sequence
  Antisense nucleotide
tttgtagtgcaagtcaaaat

SEQ ID NO: 139 - DNA, 20 bp, Artificial Sequence
  Antisense nucleotide
catgtcattaaatggacaat

SEQ ID NO: 140 - DNA, 20 bp, Artificial Sequence
  Antisense nucleotide
cctacatttgtgcgaacttc

SEQ ID NO: 141 - DNA, 20 bp, Artificial Sequence
  Antisense nucleotide
ttccccctttgaaaaactca

SEQ ID NO: 142 - DNA, 20 bp, Artificial Sequence
  Antisense nucleotide
tttttaatcagcctgcaaag

SEQ ID NO: 143 - DNA, 20 bp, Artificial Sequence
  Antisense nucleotide
actgggcagacagtttcgga

SEQ ID NO: 144 - DNA, 20 bp, Artificial Sequence
  Antisense nucleotide
taacaactgggcagacagtt

SEQ ID NO: 145 - DNA, 20 bp, Artificial Sequence
  Antisense nucleotide
tgttgtaacaactgggcaga

SEQ ID NO: 146 - DNA, 20 bp, Artificial Sequence
  Antisense nucleotide
cacagagcacctgggactgt

SEQ ID NO: 147 - DNA, 20 bp, Artificial Sequence
  Antisense nucleotide
gtacccacagagcacctggg

SEQ ID NO: 148 - DNA, 20 bp, Artificial Sequence
  Antisense nucleotide
tcaaggtacccacagagcac

SEQ ID NO: 149 - DNA, 20 bp, Artificial Sequence
  Antisense nucleotide
tggcatcaaggtacccacag

SEQ ID NO: 150 - DNA, 20 bp, Artificial Sequence
  Antisense nucleotide
ggcgggatggcatcaaggta

SEQ ID NO: 151 - DNA, 20 bp, Artificial Sequence
  Antisense nucleotide
tttgcaggtattgatggcac

SEQ ID NO: 152 - DNA, 20 bp, Artificial Sequence
  Antisense nucleotide
ctccttcgatgtaactgatg

SEQ ID NO: 153 - DNA, 20 bp, Artificial Sequence
  Antisense nucleotide
ccttgctgcgtgtcccaaga

SEQ ID NO: 154 - DNA, 20 bp, Artificial Sequence
  Antisense nucleotide
tcgatatggaccagttcatg

SEQ ID NO: 155 - DNA, 20 bp, Artificial Sequence
  Antisense nucleotide
gtcccaagatttagaacctc

SEQ ID NO: 156 - DNA, 20 bp, Artificial Sequence
  Antisense nucleotide
gaacccaaaagccagagtgc

SEQ ID NO: 157 - DNA, 20 bp, Artificial Sequence
  Antisense nucleotide
atttcaagagggatctaggg

SEQ ID NO: 158 - DNA, 20 bp, Artificial Sequence
  Antisense nucleotide
aaacataagagagccttggt

SEQ ID NO: 159 - DNA, 20 bp, Artificial Sequence
  Antisense nucleotide
tctacctgcagcacactcga

SEQ ID NO: 160 - DNA, 20 bp, Artificial Sequence
  Antisense nucleotide
tcacaacagaccaaccggcg

SEQ ID NO: 161 - DNA, 20 bp, Artificial Sequence
  Antisense nucleotide
ttccaatttggtgaaagcag

SEQ ID NO: 162 - DNA, 20 bp, Artificial Sequence
  Antisense nucleotide
actctccttgatctatactt

SEQ ID NO: 163 - DNA, 20 bp, Artificial Sequence
  Antisense nucleotide
ccgcgggcagatcctgagca

SEQ ID NO: 164 - DNA, 20 bp, Artificial Sequence
  Antisense nucleotide
caaaatagacatgccgccct

SEQ ID NO: 165 - DNA, 20 bp, Artificial Sequence
  Antisense nucleotide
tgggatttaaaataagctta

SEQ ID NO: 166 - DNA, 20 bp, Artificial Sequence
  Antisense nucleotide
cagacttgagtcacaacaga

SEQ ID NO: 167 - DNA, 20 bp, Artificial Sequence
  Antisense nucleotide
ttggatgcggcctattgctt

SEQ ID NO: 168 - DNA, 20 bp, Artificial Sequence
  Antisense nucleotide
ctacgtccactttacattga

SEQ ID NO: 169 - DNA, 20 bp, Artificial Sequence
  Antisense nucleotide
ggaggtgatttccatctaca

SEQ ID NO: 170 - DNA, 20 bp, Artificial Sequence
  Antisense nucleotide
ccttggttcatcagtgttaa

SEQ ID NO: 171 - DNA, 20 bp, Artificial Sequence
  Antisense nucleotide
acgaacccaaagggtacaat

SEQ ID NO: 172 - DNA, 20 bp, Artificial Sequence
  Antisense nucleotide
attgatttcaagagggatct

SEQ ID NO: 173 - DNA, 20 bp, Artificial Sequence
  Antisense nucleotide
ctgcctacgtccactttaca

SEQ ID NO: 174 - DNA, 20 bp, Artificial Sequence
  Antisense nucleotide
caagagcagaaggcgaatgg

SEQ ID NO: 175 - DNA, 20 bp, Artificial Sequence
  Antisense nucleotide
tcaagtccaaagatttaaca

SEQ ID NO: 176 - DNA, 20 bp, Artificial Sequence
  Antisense nucleotide
aaatagacatgccgcccttc

SEQ ID NO: 177 - DNA, 20 bp, Artificial
  Antisense nucleotide
acactcagcacagcagggtc

SEQ ID NO: 178 - DNA, 20 bp, Artificial Sequence
  Antisense nucleotide
tgaaaaggcggtactagttc

SEQ ID NO: 179 - DNA, 20 bp, Artificial Sequence
  Antisense nucleotide
gttcatgcgcaagaggatcg

SEQ ID NO: 180 - DNA, 20 bp, Artificial Sequence
  Antisense nucleotide
atctcttcccttttggccgg

SEQ ID NO: 181 - DNA, 20 bp, Artificial Sequence
  Antisense nucleotide
taatagccactcgtctcttt

SEQ ID NO: 182 - DNA, 20 bp, Artificial Sequence
  Antisense nucleotide
ccgtattaatatttccactt

SEQ ID NO: 183 - DNA, 20 bp, Artificial Sequence
  Antisense nucleotide
caaacaactctccttgatct

SEQ ID NO: 184 - DNA, 20 bp, Artificial Sequence
  Antisense nucleotide
ctgtctgcccagttgttaca

SEQ ID NO: 185 - DNA, 20 bp, Artificial Sequence
  Antisense nucleotide
tgcccagttgttacaacacc

SEQ ID NO: 186 - DNA, 20 bp, Artificial Sequence
  Antisense nucleotide
tcccaggtgctctgtgggta

SEQ ID NO: 187 - DNA, 20 bp, Artificial Sequence
  Antisense nucleotide
gatgataatgatgatgacga

SEQ ID NO: 188 - DNA, 20 bp, Artificial Sequence
  Antisense nucleotide
gctatgcaataggcaccctt

SEQ ID NO: 189 - DNA, 20 bp, Artificial Sequence
  Antisense nucleotide
ctcttagagttaacagtgag

SEQ ID NO: 190 - DNA, 20 bp, Artificial Sequence
  Antisense nucleotide
gtggagaccaaatactttgc

SEQ ID NO: 191 - DNA, 20 bp, Artificial Sequence
  Antisense nucleotide
gaaagtctgcattaagataa

SEQ ID NO: 192 - DNA, 20 bp, Artificial Sequence
  Antisense nucleotide
ctaaggaagcttcttgtaag

SEQ ID NO: 193 - DNA, 20 bp, Artificial Sequence
  Antisense nucleotide
gcaagctgaagctcaccagt

SEQ ID NO: 194 - DNA, 20 bp, Artificial Sequence
  Antisense nucleotide
tagggtggaaatggatacac

SEQ ID NO: 195 - DNA, 20 bp, Artificial Sequence
  Antisense nucleotide
caatgccaacttctgtgctg

SEQ ID NO: 196 - DNA, 20 bp, Artificial Sequence
  Antisense nucleotide
aagcatctgcttctccttgc

SEQ ID NO: 197 - DNA, 20 bp, Artificial Sequence
  Antisense nucleotide
cagctaaaattcttggaaaa

SEQ ID NO: 198 - DNA, 20 bp, Artificial Sequence
  Antisense nucleotide
gatgatgcttgtaacaagaa

SEQ ID NO: 199 - DNA, 20 bp, Artificial Sequence
  Antisense nucleotide
aaactcctagctgtctgccc

SEQ ID NO: 200 - DNA, 20 bp, Artificial Sequence
  Antisense nucleotide
gggtaccttggtgagtacac

SEQ ID NO: 201 - DNA, 20 bp, Artificial Sequence
  Antisense nucleotide
cggcctcccaaagtgctggg

SEQ ID NO: 202 - DNA, 20 bp, Artificial Sequence
  Antisense nucleotide
tgggattacaggcgtgagcc

SEQ ID NO: 203 - DNA, 20 bp, Artificial Sequence
  Antisense nucleotide
tgtatagccatcaccactat

SEQ ID NO: 204 - DNA, 20 bp, Artificial Sequence
  Antisense nucleotide
acactgaactccatttcttc

SEQ ID NO: 205 - DNA, 20 bp, Artificial Sequence
  Antisense nucleotide
cctctcccttccaggagaaa

SEQ ID NO: 206 - DNA, 20 bp, Artificial Sequence
  Antisense nucleotide
gttgggaacgcgttgcattt

SEQ ID NO: 207 - DNA, 20 bp, Artificial Sequence
  Antisense nucleotide
ccgctctgagaattactagt

SEQ ID NO: 208 - DNA, 20 bp, Artificial Sequence
  Antisense nucleotide
ctgagaattactagtttctt

SEQ ID NO: 209 - DNA, 20 bp, Artificial Sequence
  Antisense nucleotide
tttaaaaacatgcactactg

SEQ ID NO: 210 - DNA, 20 bp, Artificial Sequence
  Antisense nucleotide
atgcactactgtgtgctgag

SEQ ID NO: 211 - DNA, 20 bp, Artificial Sequence
  Antisense nucleotide
gcgctcagtctgtctacctg

SEQ ID NO: 212 - DNA, 20 bp, Artificial Sequence
  Antisense nucleotide
atgcgcaagaggatcgaggc

SEQ ID NO: 213 - DNA, 20 bp, Artificial Sequence
  Antisense nucleotide
agaggatcgaggccatccgc

SEQ ID NO: 214 - DNA, 20 bp, Artificial Sequence
  Antisense nucleotide
atccgcgggcagatcctgag

SEQ ID NO: 215 - DNA, 20 bp, Artificial Sequence
  Antisense nucleotide
cccggaagactatccggagc

SEQ ID NO: 216 - DNA, 20 bp, Artificial Sequence
  Antisense nucleotide
cccggaggtgatttccatct

SEQ ID NO: 217 - DNA, 20 bp, Artificial Sequence
  Antisense nucleotide
aggtgatttccatctacaac

SEQ ID NO: 218 - DNA, 20 bp, Artificial Sequence
  Antisense nucleotide
tccatctacaacagtaccag

SEQ ID NO: 219 - DNA, 20 bp, Artificial Sequence
  Antisense nucleotide
aagccggagggcagccgcct

SEQ ID NO: 220 - DNA, 20 bp, Artificial Sequence
  Antisense nucleotide
agtactacgccaaggaggtt

SEQ ID NO: 221 - DNA, 20 bp, Artificial Sequence
  Antisense nucleotide
gccaaggaggtttataaaat

SEQ ID NO: 222 - DNA, 20 bp, Artificial Sequence
  Antisense nucleotide
tttataaaatcgacatgccg

SEQ ID NO: 223 - DNA, 20 bp, Artificial Sequence
  Antisense nucleotide
cctccgaaaatgccatcccg

SEQ ID NO: 224 - DNA, 20 bp, Artificial Sequence
  Antisense nucleotide
ccactttctacagaccctac

SEQ ID NO: 225 - DNA, 20 bp, Artificial Sequence
  Antisense nucleotide
tttctacagaccctacttca

SEQ ID NO: 226 - DNA, 20 bp, Artificial Sequence
  Antisense nucleotide
tacagaccctacttcagaat

SEQ ID NO: 227 - DNA, 20 bp, Artificial Sequence
  Antisense nucleotide
tacttcagaatcgtccgctt

SEQ ID NO: 228 - DNA, 20 bp, Artificial Sequence
  Antisense nucleotide
cacaaagacaggaacctggg

SEQ ID NO: 229 - DNA, 20 bp, Artificial Sequence
  Antisense nucleotide
taaaataagtttacactgcc

SEQ ID NO: 230 - DNA, 20 bp, Artificial Sequence
  Antisense nucleotide
tgcaggtattgatggcacct

SEQ ID NO: 231 - DNA, 20 bp, Artificial Sequence
  Antisense nucleotide
ccagtggtgatcagaaaact

SEQ ID NO: 232 - DNA, 20 bp, Artificial Sequence
  Antisense nucleotide
tggtgatcagaaaactataa

SEQ ID NO: 233 - DNA, 20 bp, Artificial Sequence
  Antisense nucleotide
cctgctaatgttgttgccct

SEQ ID NO: 234 - DNA, 20 bp, Artificial Sequence
  Antisense nucleotide
gccctcctacagactggagt

SEQ ID NO: 235 - DNA, 20 bp, Artificial Sequence
  Antisense nucleotide
tgctttagaaatgtgcagga

SEQ ID NO: 236 - DNA, 20 bp, Artificial Sequence
  Antisense nucleotide
tgccttcgccctctttacat

SEQ ID NO: 237 - DNA, 20 bp, Artificial Sequence
  Antisense nucleotide
gattttaagagggatcttgg

SEQ ID NO: 238 - DNA, 20 bp, Artificial Sequence
  Antisense nucleotide
tggatccatgaacccaaagg

SEQ ID NO: 239 - DNA, 20 bp, Artificial Sequence
  Antisense nucleotide
gaacccaaagggtacaatgc

SEQ ID NO: 240 - DNA, 20 bp, Artificial Sequence
  Antisense nucleotide
tacaatgctaacttctgtgc

SEQ ID NO: 241 - DNA, 20 bp, Artificial Sequence
  Antisense nucleotide
ccttgctgtgtgtcccagga

SEQ ID NO: 242 - DNA, 20 bp, Artificial Sequence
  Antisense nucleotide
gtcttgtaaatgcagctaaa

SEQ ID NO: 243 - DNA, 20 bp, Artificial Sequence
  Antisense nucleotide
aaatgcagctaaagtccttg

SEQ ID NO: 244 - DNA, 20 bp, Artificial Sequence
  Antisense nucleotide
aaaatcacggtgacaatgac

SEQ ID NO: 245 - DNA, 20 bp, Artificial Sequence
  Antisense nucleotide
gttctgtttgttaaaactgg

SEQ ID NO: 246 - DNA, 20 bp, Artificial Sequence
  Antisense nucleotide
gtttgttaaaactggcatct

SEQ ID NO: 247 - DNA, 20 bp, Artificial Sequence
  Antisense nucleotide
tgtgttactatataatgaac

SEQ ID NO: 248 - DNA, 20 bp, Artificial Sequence
  Antisense nucleotide
acctttcattacccttggaa

SEQ ID NO: 249 - DNA, 20 bp, Artificial Sequence
  Antisense nucleotide
aaactcatggatggcttaag

SEQ ID NO: 250 - DNA, 20 bp, Artificial Sequence
  Antisense nucleotide
aattgtaaatggttctttgc

SEQ ID NO: 251 - DNA, 20 bp, Artificial Sequence
  Antisense nucleotide
tctttgccagtttaagcaag

SEQ ID NO: 252 - DNA, 20 bp, Artificial Sequence
  Antisense nucleotide
acagtaactactttacatgt

SEQ ID NO: 253 - DNA, 20 bp, Artificial Sequence
  Antisense nucleotide
ctactttacatgtaatgtgt

SEQ ID NO: 254 - DNA, 20 bp, Artificial Sequence
  Antisense nucleotide
catgtaatgtgtagatctta

SEQ ID NO: 255 - DNA, 20 bp, Artificial Sequence
  Antisense nucleotide
gctggccagtacctttgaat

SEQ ID NO: 256 - DNA, 20 bp, Artificial
  Antisense nucleotide
ctttgcaggctgattaaaaa

SEQ ID NO: 257 - DNA, 20 bp, Artificial Sequence
  Antisense nucleotide
aactgtctgcccagttgtta

SEQ ID NO: 258 - DNA, 20 bp, Artificial Sequence
  Antisense nucleotide
tctgcccagttgttacaaca

SEQ ID NO: 259 - DNA, 20 bp, Artificial Sequence
  Antisense nucleotide
acagtcccaggtgctctgtg

SEQ ID NO: 260 - DNA, 20 bp, Artificial Sequence
  Antisense nucleotide
cccaggtgctctgtgggtac

SEQ ID NO: 261 - DNA, 20 bp, Artificial Sequence
  Antisense nucleotide
gtgctctgtgggtaccttga

SEQ ID NO: 262 - DNA, 20 bp, Artificial Sequence
  Antisense nucleotide
ctgtgggtaccttgatgcca

SEQ ID NO: 263 - DNA, 20 bp, Artificial Sequence
  Antisense nucleotide
taccttgatgccatcccgcc

SEQ ID NO: 264 - DNA, 20 bp, Artificial Sequence
  Antisense nucleotide
ttccaccattagcacgcggg

SEQ ID NO: 265 - DNA, 20 bp, Artificial Sequence
  Antisense nucleotide
ccgtgaccagatgcaggatc

SEQ ID NO: 266 - DNA, 21 bp, Artificial Sequence
  Antisense nucleotide
cccggagggcggcatggggga

SEQ ID NO: 267 - DNA, 18 bp, Artificial Sequence
  Antisense nucleotide
cctcagggagaagggcgc

SEQ ID NO: 268 - DNA, 18 bp, Artificial Sequence
  Antisense nucleotide
gtaggagggcctcgaggg

SEQ ID NO: 269 - DNA, 18 bp, Artificial Sequence
  Antisense nucleotide
ctgcaggggctgggggtc

SEQ ID NO: 270 - DNA, 18 bp, Artificial Sequence
  Antisense nucleotide
agggctggtgtggtgggg

SEQ ID NO: 271 - DNA, 18 bp, Artificial Sequence
  Antisense nucleotide
ggcatgggggaggcggcg

SEQ ID NO: 272 - DNA, 18 bp, Artificial Sequence
  Antisense nucleotide
ccggagggcggcatgggg

SEQ ID NO: 273 - DNA, 18 bp, Artificial Sequence
  Antisense nucleotide
ggggggctggcgagccgc

SEQ ID NO: 274 - DNA, 23 bp, Artificial Sequence
  Antisense nucleotide
ggacaggatctggccgcggatgg

SEQ ID NO: 275 - DNA, 18 bp, Artificial Sequence
  Antisense nucleotide
ccccctggctcggggggc

SEQ ID NO: 276 - DNA, 18 bp, Artificial Sequence
  Antisense nucleotide
gggccgggcggcacctcc

SEQ ID NO: 277 - DNA, 18 bp, Artificial Sequence
  Antisense nucleotide
gggcagcgggccgggcgg

SEQ ID NO: 278 - DNA, 18 bp, Artificial Sequence
  Antisense nucleotide
acggcctcgggcagcggg

SEQ ID NO: 279 - DNA, 18 bp, Artificial Sequence
  Antisense nucleotide
gggtgctgttgtacaggg

SEQ ID NO: 280 - DNA, 24 bp, Artificial Sequence
  Antisense nucleotide
gggtttccaccattagcacgcggg

SEQ ID NO: 281 - DNA, 14 bp, Artificial Sequence
  Antisense nucleotide
tcatagatttcgtt

SEQ ID NO: 282 - DNA, 13 bp, Artificial Sequence
  Antisense nucleotide
ttgtcatagattt

SEQ ID NO: 283 - DNA, 15 bp, Artificial Sequence
  Antisense nucleotide
aagaacatatatatg

SEQ ID NO: 284 - DNA, 14 bp, Artificial Sequence
  Antisense nucleotide
aagaacatatatat

SEQ ID NO: 285 - DNA, 16 bp, Artificial Sequence
  Antisense nucleotide
ttgaagaacatatata

SEQ ID NO: 286 - DNA, 18 bp, Artificial Sequence
  Antisense nucleotide
ccgggagagcaacacggg

SEQ ID NO: 287 - DNA, 13 bp, Artificial
  Antisense nucleotide
acttttaacttga

SEQ ID NO: 288 - DNA, 15 bp, Artificial Sequence
  Antisense nucleotide
attgttgctgtattt

SEQ ID NO: 289 - DNA, 14 bp, Artificial Sequence
  Antisense nucleotide
attgttgctgtatt

SEQ ID NO: 290 - DNA, 15 bp, Artificial Sequence
  Antisense nucleotide
aattgttgctgtatt

SEQ ID NO: 291 - DNA, 14 bp, Artificial Sequence
  Antisense nucleotide
aattgttgctgtat

SEQ ID NO: 292 - DNA, 27 bp, Artificial Sequence
  Antisense nucleotide
ggcgagtcgctgggtgccagcagccgg

SEQ ID NO: 293 - DNA, 14 bp, Artificial Sequence
  Antisense nucleotide
ggcgagtcgctggg

SEQ ID NO: 294 - DNA, 14 bp, Artificial Sequence
  Antisense nucleotide
acatcaaaagataa

SEQ ID NO: 295 - DNA, 14 bp, Artificial Sequence
  Antisense nucleotide
tgacatcaaaagat

SEQ ID NO: 296 - DNA, 18 bp, Artificial Sequence
  Antisense nucleotide
gggccctctccagcgggg

SEQ ID NO: 297 - DNA, 18 bp, Artificial Sequence
  Antisense nucleotide
gggctcggcggtgccggg

SEQ ID NO: 298 - DNA, 18 bp, Artificial Sequence
  Antisense nucleotide
ggggcagggcccgaggca

SEQ ID NO: 299 - DNA, 18 bp, Artificial Sequence
  Antisense nucleotide
ggctccaaatgtaggggc

SEQ ID NO: 300 - DNA, 24 bp, Artificial Sequence
  Antisense nucleotide
cgggttatgctggttgtacagggc

SEQ ID NO: 301 - DNA, 22 bp, Artificial Sequence
  Antisense nucleotide
cggcgccgccgaggcgcccggg

SEQ ID NO: 302 - DNA, 16 bp, Artificial Sequence
  Antisense nucleotide
ggggcggggcgggacc

SEQ ID NO: 303 - DNA, 18 bp, Artificial Sequence
  Antisense nucleotide
gggcggggcggggcgggg

SEQ ID NO: 304 - DNA, 18 bp, Artificial Sequence
  Antisense nucleotide
gggcggggtggggccggg

SEQ ID NO: 305 - DNA, 22 bp, Artificial Sequence
  Antisense nucleotide
gggcaaggcagcgggggcgggg

SEQ ID NO: 306 - DNA, 14 bp, Artificial
  Antisense nucleotide
cggtagcagcagcg

SEQ ID NO: 307 - DNA, 14 bp, Artificial Sequence
  Antisense nucleotide
ccagtagccacagc

SEQ ID NO: 308 - DNA, 15 bp, Artificial Sequence
  Antisense nucleotide
gcaggtggatagtcc

SEQ ID NO: 309 - DNA, 15 bp, Artificial Sequence
  Antisense nucleotide
cttgcaggtggatag

SEQ ID NO: 310 - DNA, 15 bp, Artificial Sequence
  Antisense nucleotide
cgatagtcttgcagg

SEQ ID NO: 311 - DNA, 18 bp, Artificial Sequence
  Antisense nucleotide
ccatgtcgatagtcttgc

SEQ ID NO: 312 - DNA, 15 bp, Artificial Sequence
  Antisense nucleotide
ctcgatgcgcttccg

SEQ ID NO: 313 - DNA, 15 bp, Artificial Sequence
  Antisense nucleotide
cctcgatgcgcttcc

SEQ ID NO: 314 - DNA, 15 bp, Artificial Sequence
  Antisense nucleotide
ggatggcctcgatgc

SEQ ID NO: 315 - DNA, 15 bp, Artificial Sequence
  Antisense nucleotide
ggacaggatctggcc

SEQ ID NO: 316 - DNA, 15 bp, Artificial Sequence
  Antisense nucleotide
cgcagcttggacagg

SEQ ID NO: 317 - DNA, 14 bp, Artificial Sequence
  Antisense nucleotide
gagccgcagcttgg

SEQ ID NO: 318 - DNA, 14 bp, Artificial Sequence
  Antisense nucleotide
cgagccgcagcttg

SEQ ID NO: 319 - DNA, 14 bp, Artificial Sequence
  Antisense nucleotide
acctccccctggct

SEQ ID NO: 320 - DNA, 14 bp, Artificial Sequence
  Antisense nucleotide
ccaccattagcacg

SEQ ID NO: 321 - DNA, 18 bp, Artificial Sequence
  Antisense nucleotide
gaacttgtcatagatttc

SEQ ID NO: 322 - DNA, 16 bp, Artificial Sequence
  Antisense nucleotide
gctgtgtgtactctgc

SEQ ID NO: 323 - DNA, 14 bp, Artificial Sequence
  Antisense nucleotide
gctccacgtgctgc

SEQ ID NO: 324 - DNA, 18 bp, Artificial Sequence
  Antisense nucleotide
gaattgttgctgtatttc

SEQ ID NO: 325 - DNA, 15 bp, Artificial Sequence
  Antisense nucleotide
gccaggaattgttgc

SEQ ID NO: 326 - DNA, 18 bp, Artificial Sequence
  Antisense nucleotide
gtgacatcaaaagataac

SEQ ID NO: 327 - DNA, 15 bp, Artificial Sequence
  Antisense nucleotide
ggctcaaccactgcc

SEQ ID NO: 328 - DNA, 14 bp, Artificial Sequence
  Antisense nucleotide
gctgtcacaggagc

SEQ ID NO: 329 - DNA, 14 bp, Artificial Sequence
  Antisense nucleotide
cctgctgtcacagg

SEQ ID NO: 330 - DNA, 18 bp, Artificial Sequence
  Antisense nucleotide
gcagtgtgttatccctgc

SEQ ID NO: 331 - DNA, 15 bp, Artificial Sequence
  Antisense nucleotide
gcagtgtgttatccc

SEQ ID NO: 332 - DNA, 14 bp, Artificial Sequence
  Antisense nucleotide
ccaggtcacctcgg

SEQ ID NO: 333 - DNA, 15 bp, Artificial Sequence
  Antisense nucleotide
gccatgaatggtggc

SEQ ID NO: 334 - DNA, 14 bp, Artificial Sequence
  Antisense nucleotide
gccatgaatggtgg

SEQ ID NO: 335 - DNA, 14 bp, Artificial Sequence
  Antisense nucleotide
ccatgagaagcagg

SEQ ID NO: 336 - DNA, 17 bp, Artificial Sequence
  Antisense nucleotide
ggaagtcaatgtacagc

SEQ ID NO: 337 - DNA, 18 bp, Artificial Sequence
  Antisense nucleotide
ccacgtagtacacgatgg

SEQ ID NO: 338 - DNA, 14 bp, Artificial Sequence
  Antisense nucleotide
gcacttgcaggagc

SEQ ID NO: 339 - DNA, 14 bp, Artificial Sequence
  Antisense nucleotide
ccatggcagtgacc

SEQ ID NO: 340 - DNA, 14 bp, Artificial Sequence
  Antisense nucleotide
ggctcctccatggc

SEQ ID NO: 341 - DNA, 16 bp, Artificial
  Antisense nucleotide
gctaggatctgactgc

SEQ ID NO: 342 - DNA, 14 bp, Artificial Sequence
  Antisense nucleotide
cctgactcagaggg

SEQ ID NO: 343 - DNA, 17 bp, Artificial Sequence
  Antisense nucleotide
ggtctgaaaatgtttcc

SEQ ID NO: 344 - DNA, 16 bp, Artificial Sequence
  Antisense nucleotide
ccattgcttgggacgg

SEQ ID NO: 345 - DNA, 14 bp, Artificial Sequence
  Antisense nucleotide
gcatcaaatcatcc

SEQ ID NO: 346 - DNA, 16 bp, Artificial Sequence
  Antisense nucleotide
ccattgttcaatatcg

SEQ ID NO: 347 - DNA, 15 bp, Artificial Sequence
  Antisense nucleotide
ggtcttcagtgaacc

SEQ ID NO: 348 - DNA, 17 bp, Artificial Sequence
  Antisense nucleotide
ggagcttcatctggacc

SEQ ID NO: 349 - DNA, 15 bp, Artificial Sequence
  Antisense nucleotide
cctctggcattctgg

SEQ ID NO: 350 - DNA, 14 bp, Artificial Sequence
  Antisense nucleotide
agggacagaagatg

SEQ ID NO: 351 - DNA, 14 bp, Artificial Sequence
  Antisense nucleotide
gttttctgggaagg

SEQ ID NO: 352 - DNA, 14 bp, Artificial Sequence
  Antisense nucleotide
ggttttctgggaag

SEQ ID NO: 353 - DNA, 15 bp, Artificial Sequence
  Antisense nucleotide
aggttttctgggaag

SEQ ID NO: 354 - DNA, 14 bp, Artificial Sequence
  Antisense nucleotide
gtaggttttctggg

SEQ ID NO: 355 - DNA, 14 bp, Artificial Sequence
  Antisense nucleotide
ggtaggttttctgg

SEQ ID NO: 356 - DNA, 17 bp, Artificial Sequence
  Antisense nucleotide
ccagaatgcaagaagcc

SEQ ID NO: 357 - DNA, 15 bp, Artificial Sequence
  Antisense nucleotide
gctgtcccagaatgc

SEQ ID NO: 358 - DNA, 18 bp, Artificial Sequence
  Antisense nucleotide
gcaagtcacagacttggc

SEQ ID NO: 359 - DNA, 15 bp, Artificial Sequence
  Antisense nucleotide
ccacagctgcacagg

SEQ ID NO: 360 - DNA, 15 bp, Artificial Sequence
  Antisense nucleotide
ggtgtggaatcaacc

SEQ ID NO: 361 - DNA, 14 bp, Artificial Sequence
  Antisense nucleotide
gtcatgtgctgtga

SEQ ID NO: 362 - DNA, 16 bp, Artificial Sequence
  Antisense nucleotide
cgctatctgagcagcg

SEQ ID NO: 363 - DNA, 15 bp, Artificial Sequence
  Antisense nucleotide
ccagtgtgatgatgg

SEQ ID NO: 364 - DNA, 18 bp, Artificial Sequence
  Antisense nucleotide
ccagtagattaccactgg

SEQ ID NO: 365 - DNA, 16 bp, Artificial Sequence
  Antisense nucleotide
ggcacaaacacgcacc

SEQ ID NO: 366 - DNA, 15 bp, Artificial Sequence
  Antisense nucleotide
ccacggatctgaagg

SEQ ID NO: 367 - DNA, 17 bp, Artificial Sequence
  Antisense nucleotide
cggaacatctcgaagcg

SEQ ID NO: 368 - DNA, 17 bp, Artificial Sequence
  Antisense nucleotide
cctcattcagctctcgg

SEQ ID NO: 369 - DNA, 15 bp, Artificial Sequence
  Antisense nucleotide
ccttgagttccaagg

SEQ ID NO: 370 - DNA, 17 bp, Artificial Sequence
  Antisense nucleotide
cctttttggacttcagg

SEQ ID NO: 371 - DNA, 16 bp, Artificial
  Antisense nucleotide
ggaggtagactgaccc

SEQ ID NO: 372 - DNA, 12 bp, Artificial Sequence
  Antisense nucleotide
aaaatgtttcct

SEQ ID NO: 373 - DNA, 12 bp, Artificial Sequence
  Antisense nucleotide
tgaaaatgtttc

SEQ ID NO: 374 - DNA, 12 bp, Artificial Sequence
  Antisense nucleotide
ctgaaaatgttt

SEQ ID NO: 375 - DNA, 13 bp, Artificial Sequence
  Antisense nucleotide
tctgaaaatgttt

SEQ ID NO: 376 - DNA, 12 bp, Artificial Sequence
  Antisense nucleotide
tctgaaaatgtt

SEQ ID NO: 377 - DNA, 12 bp, Artificial Sequence
  Antisense nucleotide
aaatcatccatt

SEQ ID NO: 378 - DNA, 12 bp, Artificial Sequence
  Antisense nucleotide
ttgttcaatatc

SEQ ID NO: 379 - DNA, 13 bp, Artificial Sequence
  Antisense nucleotide
attgttcaatatc

SEQ ID NO: 380 - DNA, 12 bp, Artificial Sequence
  Antisense nucleotide
attgttcaatat

SEQ ID NO: 381 - DNA, 13 bp, Artificial Sequence
  Antisense nucleotide
cattgttcaatat

SEQ ID NO: 382 - DNA, 12 bp, Artificial Sequence
  Antisense nucleotide
cattgttcaata

SEQ ID NO: 383 - DNA, 12 bp, Artificial Sequence
  Antisense nucleotide
aaaagtgtttct

SEQ ID NO: 384 - DNA, 15 bp, Artificial Sequence
  Antisense nucleotide
acatgagttttttat

SEQ ID NO: 385 - DNA, 16 bp, Artificial Sequence
  Antisense nucleotide
aacatgagttttttat

SEQ ID NO: 386 - DNA, 14 bp, Artificial Sequence
  Antisense nucleotide
acatgagtttttta

SEQ ID NO: 387 - DNA, 15 bp, Artificial Sequence
  Antisense nucleotide
aacatgagtttttta

SEQ ID NO: 388 - DNA, 14 bp, Artificial
  Antisense nucleotide
aacatgagtttttt

SEQ ID NO: 389 - DNA, 13 bp, Artificial Sequence
  Antisense nucleotide
aaaacatcttgtt

SEQ ID NO: 390 - DNA, 17 bp, Artificial Sequence
  Antisense nucleotide
cagagggggctcgacgc

SEQ ID NO: 391 - DNA, 18 bp, Artificial
  Antisense nucleotide
ctgactcagagggggctc

SEQ ID NO: 392 - DNA, 14 bp, Artificial Sequence
  Antisense nucleotide
agggggacagaacg

SEQ ID NO: 393 - DNA, 23 bp, Artificial Sequence
  Antisense nucleotide
ttgggacggcaagggggacagaa

SEQ ID NO: 394 - DNA, 17 bp, Artificial Sequence
  Antisense nucleotide
tgggacggcaaggggga

SEQ ID NO: 395 - DNA, 15 bp, Artificial Sequence
  Antisense nucleotide
gccacggggggagca

SEQ ID NO: 396 - DNA, 19 bp, Artificial Sequence
  Antisense nucleotide
gcaggggccacggggggag

SEQ ID NO: 397 - DNA, 14 bp, Artificial Sequence
  Antisense nucleotide
aggggccacggggg

SEQ ID NO: 398 - DNA, 14 bp, Artificial Sequence
  Antisense nucleotide
caggggccacgggg

SEQ ID NO: 399 - DNA, 15 bp, Artificial Sequence
  Antisense nucleotide
ggtgcaggggccacg

SEQ ID NO: 400 - DNA, 18 bp, Artificial Sequence
  Antisense nucleotide
tggtgcaggggccgccgg

SEQ ID NO: 401 - DNA, 18 bp, Artificial Sequence
  Antisense nucleotide
ggggctggtgcaggggcc

SEQ ID NO: 402 - DNA, 18 bp, Artificial Sequence
  Antisense Nucleotide
agggggctggtgcagggg

SEQ ID NO: 403 - DNA, 14 bp, Artificial Sequence
  Antisense nucleotide
gggctggtgcaggg

SEQ ID NO: 404 - DNA, 16 bp, Artificial Sequence
  Antisense nucleotide
gagggggctggtgcag

SEQ ID NO: 405 - DNA, 15 bp, Artificial Sequence
  Antisense nucleotide
aggagggggctggtg

SEQ ID NO: 406 - DNA, 18 bp, Artificial Sequence
  Antisense nucleotide
gggccaggagggggctgg

SEQ ID NO: 407 - DNA, 18 bp, Artificial Sequence
  Antisense nucleotide
aggggccaggagggggct

SEQ ID NO: 408 - DNA, 14 bp, Artificial Sequence
  Antisense nucleotide
ggggccaggagggg

SEQ ID NO: 409 - DNA, 15 bp, Artificial Sequence
  Antisense nucleotide
caggggccaggaggg

SEQ ID NO: 410 - DNA, 16 bp, Artificial Sequence
  Antisense nucleotide
tctgggaagggacaga

SEQ ID NO: 411 - DNA, 16 bp, Artificial Sequence
  Antisense nucleotide
tgagggcaggggagta

SEQ ID NO: 412 - DNA, 15 bp, Artificial Sequence
  Antisense nucleotide
ttgagggcaggggag

SEQ ID NO: 413 - DNA, 19 bp, Artificial Sequence
  Antisense nucleotide
cgggtgccgggcgggggtg

SEQ ID NO: 414 - DNA, 24 bp, Artificial Sequence
  Antisense nucleotide
cggacgcgggtgccgggcgggggt

SEQ ID NO: 415 - DNA, 15 bp, Artificial Sequence
  Antisense nucleotide
cgggtgccgggcggg

SEQ ID NO: 416 - DNA, 18 bp, Artificial Sequence
  Antisense nucleotide
ggacgcgggtgccgggcg

SEQ ID NO: 417 - DNA, 18 bp, Artificial Sequence
  Antisense nucleotide
tgggggcagcgcctcaca

SEQ ID NO: 418 - DNA, 16 bp, Artificial Sequence
  Antisense nucleotide
ggtgggggcagcgcct

SEQ ID NO: 419 - DNA, 20 bp, Artificial Sequence
  Antisense nucleotide
ccattttagtgcacatccgg

SEQ ID NO: 420 - DNA, 18 bp, Artificial Sequence
  Antisense nucleotide
ccattttagtgcacatcc

SEQ ID NO: 421 - DNA, 18 bp, Artificial Sequence
  Antisense nucleotide
gctgttccattttagtgc

SEQ ID NO: 422 - DNA, 14 bp, Artificial Sequence
  Antisense nucleotide
gtagtcgtgtagag

SEQ ID NO: 423 - DNA, 16 bp, Artificial Sequence
  Antisense nucleotide
gtttgtagtcgtgtag

SEQ ID NO: 424 - DNA, 17 bp, Artificial Sequence
  Antisense nucleotide
gtttcaggagtttgtag

SEQ ID NO: 425 - DNA, 15 bp, Artificial Sequence
  Antisense nucleotide
ccagctccgaagagg

SEQ ID NO: 426 - DNA, 16 bp, Artificial Sequence
  Antisense nucleotide
cgtcgtcgtgatcacg

SEQ ID NO: 427 - DNA, 16 bp, Artificial Sequence
  Antisense nucleotide
ggtaaaagtactgtcc

SEQ ID NO: 428 - DNA, 15 bp, Artificial Sequence
  Antisense nucleotide
ggctttgacaaagcc

SEQ ID NO: 429 - DNA, 18 bp, Artificial Sequence
  Antisense nucleotide
cttgtgcagatcgtccag

SEQ ID NO: 430 - DNA, 17 bp, Artificial Sequence
  Antisense nucleotide
cgtggttcatcttgtgc

SEQ ID NO: 431 - DNA, 18 bp, Artificial Sequence
  Antisense nucleotide
cacgtggttcatcttgtg

SEQ ID NO: 432 - DNA, 15 bp, Artificial Sequence
  Antisense nucleotide
cctccttgaaggtgg

SEQ ID NO: 433 - DNA, 17 bp, Artificial Sequence
  Antisense nucleotide
cgctccactttgatgcg

SEQ ID NO: 434 - DNA, 14 bp, Artificial Sequence
  Antisense nucleotide
ccttgtcctccagg

SEQ ID NO: 435 - DNA, 14 bp, Artificial Sequence
  Antisense nucleotide
ggtactcgacagcc

SEQ ID NO: 436 - DNA, 15 bp, Artificial Sequence
  Antisense nucleotide
ctgacgtgggtcatg

SEQ ID NO: 437 - DNA, 15 bp, Artificial Sequence
  Antisense nucleotide
ccgttgctgacgtgg

SEQ ID NO: 438 - DNA, 14 bp, Artificial Sequence
  Antisense nucleotide
catcctccgcctcc

SEQ ID NO: 439 - DNA, 14 bp, Artificial Sequence
  Antisense nucleotide
gtttccatcctccg

SEQ ID NO: 440 - DNA, 16 bp, Artificial Sequence
  Antisense nucleotide
ggtgtttccatcctcc

SEQ ID NO: 441 - DNA, 15 bp, Artificial Sequence
  Antisense nucleotide
ggtgtttccatcctc

SEQ ID NO: 442 - DNA, 15 bp, Artificial Sequence
  Antisense nucleotide
gctcagcgcctcatc

SEQ ID NO: 443 - DNA, 18 bp, Artificial Sequence
  Antisense nucleotide
ccttcttcatcatgctgc

SEQ ID NO: 444 - DNA, 17 bp, Artificial Sequence
  Antisense nucleotide
ccttcttcatcatgctg

SEQ ID NO: 445 - DNA, 15 bp, Artificial Sequence
  Antisense nucleotide
ccttcttcatcatgc

SEQ ID NO: 446 - DNA, 19 bp, Artificial Sequence
  Antisense nucleotide
gcgtccttcttcatcatgc

SEQ ID NO: 447 - DNA, 14 bp, Artificial Sequence
  Antisense nucleotide
cctgctcactcagg

SEQ ID NO: 448 - DNA, 14 bp, Artificial Sequence
  Antisense nucleotide
cgcaggcttgagcg

SEQ ID NO: 449 - DNA, 15 bp, Artificial Sequence
  Antisense nucleotide
gccagcttcagcagc

SEQ ID NO: 450 - DNA, 14 bp, Artificial Sequence
  Antisense nucleotide
ggtggtgaccagcc

SEQ ID NO: 451 - DNA, 14 bp, Artificial Sequence
  Antisense nucleotide
cctcggcgaactcc

SEQ ID NO: 452 - DNA, 14 bp, Artificial Sequence
  Antisense nucleotide
gcttgtgtaaatcc

SEQ ID NO: 453 - DNA, 20 bp, Artificial Sequence
  Antisense nucleotide
ggttctgcttgtgtaaatcc

SEQ ID NO: 454 - DNA, 15 bp, Artificial Sequence
  Antisense nucleotide
gctgctcaggttcgc

SEQ ID NO: 455 - DNA, 14 bp, Artificial Sequence
  Antisense nucleotide
gaaggcgaccgtcg

SEQ ID NO: 456 - DNA, 14 bp, Artificial Sequence
  Antisense nucleotide
cgaaggcgaccgtc

SEQ ID NO: 457 - DNA, 14 bp, Artificial Sequence
  Antisense nucleotide
gcaccgtctgtggc

SEQ ID NO: 458 - DNA, 17 bp, Artificial Sequence
  Antisense nucleotide
cgtgtccatgtcgatgg

SEQ ID NO: 459 - DNA, 16 bp, Artificial Sequence
  Antisense nucleotide
cgtgtccatgtcgatg

SEQ ID NO: 460 - DNA, 14 bp, Artificial Sequence
  Antisense nucleotide
gcgtgtccatgtcg

SEQ ID NO: 461 - DNA, 15 bp, Artificial Sequence
  Antisense nucleotide
ccagcttgcgcttgc

SEQ ID NO: 462 - DNA, 14 bp, Artificial Sequence
  Antisense nucleotide
cgctccagcttgcg

SEQ ID NO: 463 - DNA, 18 bp, Artificial Sequence
  Antisense nucleotide
cgtgttctgactcttgag

SEQ ID NO: 464 - DNA, 16 bp, Artificial Sequence
  Antisense nucleotide
cgtgttctgactcttg

SEQ ID NO: 465 - DNA, 14 bp, Artificial Sequence
  Antisense nucleotide
gctgttgacgtggc

SEQ ID NO: 466 - DNA, 14 bp, Artificial Sequence
  Antisense nucleotide
cgactcagtacgcc

SEQ ID NO: 467 - DNA, 14 bp, Artificial Sequence
  Antisense nucleotide
gccatgcccgactc

SEQ ID NO: 468 - DNA, 14 bp, Artificial Sequence
  Antisense nucleotide
cccttggaggtggc

SEQ ID NO: 469 - DNA, 13 bp, Artificial Sequence
  Antisense nucleotide
ttttagtgcacat

SEQ ID NO: 470 - DNA, 14 bp, Artificial Sequence
  Antisense nucleotide
tgttccattttagt

SEQ ID NO: 471 - DNA, 14 bp, Artificial Sequence
  Antisense nucleotide
aaaaaaagtggaag

SEQ ID NO: 472 - DNA, 14 bp, Artificial Sequence
  Antisense nucleotide
tacaaaaaaaagtg

SEQ ID NO: 473 - DNA, 14 bp, Artificial Sequence
  Antisense nucleotide
atacaaaaaaaagt

SEQ ID NO: 474 - DNA, 15 bp, Artificial Sequence
  Antisense nucleotide
catacaaaaaaaagt

SEQ ID NO: 475 - DNA, 14 bp, Artificial Sequence
  Antisense nucleotide
catacaaaaaaaag

SEQ ID NO: 476 - DNA, 14 bp, Artificial Sequence
  Antisense nucleotide
gaaaaaaaacatac

SEQ ID NO: 477 - DNA, 16 bp, Artificial Sequence
  Antisense nucleotide
cagaaaaaaaacatac

SEQ ID NO: 478 - DNA, 14 bp, Artificial Sequence
  Antisense nucleotide
cagaaaaaaaacat

SEQ ID NO: 479 - DNA, 14 bp, Artificial Sequence
  Antisense nucleotide
ttcaatatgaatcg

SEQ ID NO: 480 - DNA, 16 bp, Artificial Sequence
  Antisense nucleotide
tattcaatatgaatcg

SEQ ID NO: 481 - DNA, 15 bp, Artificial Sequence
  Antisense nucleotide
tattcaatatgaatc

SEQ ID NO: 482 - DNA, 14 bp, Artificial Sequence
  Antisense nucleotide
tattcaatatgaat

SEQ ID NO: 483 - DNA, 15 bp, Artificial Sequence
  Antisense nucleotide
tatattcaatatgaa

SEQ ID NO: 484 - DNA, 15 bp, Artificial
  Antisense nucleotide
ttatattcaatatga

SEQ ID NO: 485 - DNA, 17 bp, Artificial Sequence
  Antisense nucleotide
tattatattcaatatga

SEQ ID NO: 486 - DNA, 14 bp, Artificial Sequence
  Antisense nucleotide
ttatattcaatatg

SEQ ID NO: 487 - DNA, 16 bp, Artificial Sequence
  Antisense nucleotide
tattatattcaatatg

SEQ ID NO: 488 - DNA, 14 bp, Artificial Sequence
  Antisense nucleotide
attatattcaatat

SEQ ID NO: 489 - DNA, 15 bp, Artificial Sequence
  Antisense nucleotide
tattatattcaatat

SEQ ID NO: 490 - DNA, 18 bp, Artificial Sequence
  Antisense nucleotide
atatattatattcaatat

SEQ ID NO: 491 - DNA, 20 bp, Artificial Sequence
  Antisense nucleotide
aaatatattatattcaatat

SEQ ID NO: 492 - DNA, 14 bp, Artificial Sequence
  Antisense nucleotide
tattatattcaata

SEQ ID NO: 493 - DNA, 17 bp, Artificial Sequence
  Antisense nucleotide
atatattatattcaata

SEQ ID NO: 494 - DNA, 20 bp, Artificial Sequence
  Antisense nucleotide
caaatatattatattcaata

SEQ ID NO: 495 - DNA, 15 bp, Artificial Sequence
  Antisense nucleotide
tatattatattcaat

SEQ ID NO: 496 - DNA, 17 bp, Artificial Sequence
  Antisense nucleotide
aatatattatattcaat

SEQ ID NO: 497 - DNA, 14 bp, Artificial Sequence
  Antisense nucleotide
tatattatattcaa

SEQ ID NO: 498 - DNA, 18 bp, Artificial Sequence
  Antisense nucleotide
caaatatattatattcaa

SEQ ID NO: 499 - DNA, 17 bp, Artificial Sequence
  Antisense nucleotide
caaatatattatattca

SEQ ID NO: 500 - DNA, 16 bp, Artificial Sequence
  Antisense nucleotide
caaatatattatattc

SEQ ID NO: 501 - DNA, 18 bp, Artificial Sequence
  Antisense nucleotide
cacaaatatattatattc

SEQ ID NO: 502 - DNA, 14 bp, Artificial Sequence
  Antisense nucleotide
aaatatattatatt

SEQ ID NO: 503 - DNA, 15 bp, Artificial Sequence
  Antisense nucleotide
caaatatattatatt

SEQ ID NO: 504 - DNA, 14 bp, Artificial Sequence
  Antisense nucleotide
caaatatattatat

SEQ ID NO: 505 - DNA, 16 bp, Artificial Sequence
  Antisense nucleotide
cacaaatatattatat

SEQ ID NO: 506 - DNA, 14 bp, Artificial Sequence
  Antisense nucleotide
cacaaatatattat

SEQ ID NO: 507 - DNA, 16 bp, Artificial Sequence
  Antisense nucleotide
tacacaaatatattat

SEQ ID NO: 508 - DNA, 15 bp, Artificial Sequence
  Antisense nucleotide
tacacaaatatatta

SEQ ID NO: 509 - DNA, 18 bp, Artificial Sequence
  Antisense nucleotide
taaatacacaaatatatt

SEQ ID NO: 510 - DNA, 14 bp, Artificial Sequence
  Antisense nucleotide
aatacacaaatata

SEQ ID NO: 511 - DNA, 16 bp, Artificial Sequence
  Antisense nucleotide
gttaaatacacaaata

SEQ ID NO: 512 - DNA, 14 bp, Artificial Sequence
  Antisense nucleotide
tgttaaatacacaa

SEQ ID NO: 513 - DNA, 14 bp, Artificial Sequence
  Antisense nucleotide
tttagagactaagt

SEQ ID NO: 514 - DNA, 14 bp, Artificial Sequence
  Antisense nucleotide
ataaactctttaga

SEQ ID NO: 515 - DNA, 17 bp, Artificial Sequence
  Antisense nucleotide
taaaataaactctttag

SEQ ID NO: 516 - DNA, 16 bp, Artificial Sequence
  Antisense nucleotide
taaaataaactcttta

SEQ ID NO: 517 - DNA, 16 bp, Artificial Sequence
  Antisense nucleotide
ttaaaataaactcttt

SEQ ID NO: 518 - DNA, 14 bp, Artificial Sequence
  Antisense nucleotide
cttaaaataaactc

SEQ ID NO: 519 - DNA, 15 bp, Artificial Sequence
  Antisense nucleotide
taaaaagaacaaaca

SEQ ID NO: 520 - DNA, 14 bp, Artificial Sequence
  Antisense nucleotide
taaaaagaacaaac

SEQ ID NO: 521 - DNA, 15 bp, Artificial Sequence
  Antisense nucleotide
caataaaaagaacaa

SEQ ID NO: 522 - DNA, 16 bp, Artificial Sequence
  Antisense nucleotide
tcaataaaaagaacaa

SEQ ID NO: 523 - DNA, 14 bp, Artificial Sequence
  Antisense nucleotide
tcaataaaaagaac

SEQ ID NO: 524 - DNA, 14 bp, Artificial Sequence
  Antisense nucleotide
ttcaataaaaagaa

SEQ ID NO: 525 - DNA, 17 bp, Artificial Sequence
  Antisense nucleotide
tagattcaataaaaaga

SEQ ID NO: 526 - DNA, 17 bp, Artificial Sequence
  Antisense nucleotide
tggcgcgggcgggtagc

SEQ ID NO: 527 - DNA, 20 bp, Artificial Sequence
  Antisense nucleotide
gggctggcgcgggcgggtag

SEQ ID NO: 528 - DNA, 21 bp, Artificial Sequence
  Antisense nucleotide
tcgggggctggcgcgggcggg

SEQ ID NO: 529 - DNA, 26 bp, Artificial Sequence
  Antisense nucleotide
tgggtgcctggtcgcgcgttctcggg

SEQ ID NO: 530 - DNA, 18 bp, Artificial Sequence
  Antisense nucleotide
agggtccctgcggggccg

SEQ ID NO: 531 - DNA, 18 bp, Artificial Sequence
  Antisense nucleotide
gggagggtccctgcgggg

SEQ ID NO: 532 - DNA, 16 bp, Artificial Sequence
  Antisense nucleotide
gggagggtccctgcgg

SEQ ID NO: 533 - DNA, 14 bp, Artificial Sequence
  Antisense nucleotide
tgggccgggtccgc

SEQ ID NO: 534 - DNA, 14 bp, Artificial Sequence
  Antisense nucleotide
tcccgggggtgtag

SEQ ID NO: 535 - DNA, 19 bp, Artificial Sequence
  Antisense nucleotide
agtactgtcccgggggtgt

SEQ ID NO: 536 - DNA, 18 bp, Artificial Sequence
  Antisense nucleotide
gggacacgttggggggtg

SEQ ID NO: 537 - DNA, 20 bp, Artificial Sequence
  Antisense nucleotide
gccgggggccccccggtagc

SEQ ID NO: 538 - DNA, 17 bp, Artificial Sequence
  Antisense nucleotide
cgggcccagccgggggc

SEQ ID NO: 539 - DNA, 14 bp, Artificial Sequence
  Antisense nucleotide
cgggcccagccggg

SEQ ID NO: 540 - DNA, 20 bp, Artificial Sequence
  Antisense nucleotide
gggaggtggctccgggccgg

SEQ ID NO: 541 - DNA, 18 bp, Artificial Sequence
  Antisense nucleotide
agggcggcgcgtgtggga

SEQ ID NO: 542 - DNA, 20 bp, Artificial Sequence
  Antisense nucleotide
gggtggccaccggcgaaggg

SEQ ID NO: 543 - DNA, 15 bp, Artificial Sequence
  Antisense nucleotide
aggggcaggggacgt

SEQ ID NO: 544 - DNA, 18 bp, Artificial Sequence
  Antisense nucleotide
taaaggggcaggggacgt

SEQ ID NO: 545 - DNA, 20 bp, Artificial Sequence
  Antisense nucleotide
agggggtgtccgtaaagggg

SEQ ID NO: 546 - DNA, 21 bp, Artificial Sequence
  Antisense nucleotide
ggggacgcgaacgtgccgccg

SEQ ID NO: 547 - DNA, 21 bp, Artificial Sequence
  Antisense nucleotide
cggggaacaagcggcccgggg

SEQ ID NO: 548 - DNA, 14 bp, Artificial Sequence
  Antisense nucleotide
ggccgtcgggggcg

SEQ ID NO: 549 - DNA, 15 bp, Artificial Sequence
  Antisense nucleotide
gcggccgtcgggggc

SEQ ID NO: 550 - DNA, 18 bp, Artificial Sequence
  Antisense nucleotide
aggggggtaggaggcggg

SEQ ID NO: 551 - DNA, 14 bp, Artificial Sequence
  Antisense nucleotide
gcgctgggggcgcc

SEQ ID NO: 552 - DNA, 14 bp, Artificial Sequence
  Antisense nucleotide
ggccgtcggggggt

SEQ ID NO: 553 - DNA, 15 bp, Artificial Sequence
  Antisense nucleotide
ggggaggccagcttc

SEQ ID NO: 554 - DNA, 16 bp, Artificial Sequence
  Antisense nucleotide
ggccgccaccttgggg

SEQ ID NO: 555 - DNA, 16 bp, Artificial Sequence
  Antisense nucleotide
gcggccgccgccgggg

SEQ ID NO: 556 - DNA, 20 bp, Artificial Sequence
  Antisense nucleotide
gggcgcggccgccgccgggg

SEQ ID NO: 557 - DNA, 16 bp, Artificial Sequence
  Antisense nucleotide
ggggtggcggcggcgg

SEQ ID NO: 558 - DNA, 15 bp, Artificial Sequence
  Antisense nucleotide
gggggtggcggcggc

SEQ ID NO: 559 - DNA, 18 bp, Artificial Sequence
  Antisense nucleotide
tggggcagcagctggcag

SEQ ID NO: 560 - DNA, 18 bp, Artificial Sequence
  Antisense nucleotide
cggggcgcccacgacacc

SEQ ID NO: 561 - DNA, 17 bp, Artificial Sequence
  Antisense nucleotide
cggggcgcccacgacac

SEQ ID NO: 562 - DNA, 26 bp, Artificial Sequence
  Antisense nucleotide
gggccgcaccctctccaagtccgggg

SEQ ID NO: 563 - DNA, 14 bp, Artificial Sequence
  Antisense nucleotide
gcagcagtcagtgg

SEQ ID NO: 564 - DNA, 16 bp, Artificial Sequence
  Antisense nucleotide
ccattgtctagcacgg

SEQ ID NO: 565 - DNA, 17 bp, Artificial Sequence
  Antisense nucleotide
ggtctccattgtctagc

SEQ ID NO: 566 - DNA, 16 bp, Artificial Sequence
  Antisense nucleotide
ggtggtattgttcagc

SEQ ID NO: 567 - DNA, 15 bp, Artificial Sequence
  Antisense nucleotide
gctggatcaagaccc

SEQ ID NO: 568 - DNA, 16 bp, Artificial Sequence
  Antisense nucleotide
ccacaaaatcgtgtcc

SEQ ID NO: 569 - DNA, 20 bp, Artificial
  Antisense nucleotide
ccttccacaaaatcgtgtcc

SEQ ID NO: 570 - DNA, 14 bp, Artificial Sequence
  Antisense nucleotide
ggttgttcttgtgg

SEQ ID NO: 571 - DNA, 14 bp, Artificial Sequence
  Antisense nucleotide
cctcttggttgtgc

SEQ ID NO: 572 - DNA, 20 bp, Artificial Sequence
  Antisense nucleotide
ccagagtctcaaacacttgg

SEQ ID NO: 573 - DNA, 20 bp, Artificial Sequence
  Antisense nucleotide
ggtaacctgtgatctcttcc

SEQ ID NO: 574 - DNA, 14 bp, Artificial Sequence
  Antisense nucleotide
cctgcagtactcgg

SEQ ID NO: 575 - DNA, 16 bp, Artificial Sequence
  Antisense nucleotide
ggcattcacatactcc

SEQ ID NO: 576 - DNA, 16 bp, Artificial
  Antisense nucleotide
gcaaacagtgcctggc

SEQ ID NO: 577 - DNA, 17 bp, Artificial Sequence
  Antisense nucleotide
cgcatcgtgtacttccg

SEQ ID NO: 578 - DNA, 14 bp, Artificial Sequence
  Antisense nucleotide
gcacgttccgagcg

SEQ ID NO: 579 - DNA, 15 bp, Artificial Sequence
  Antisense nucleotide
ggtaccagatactcc

SEQ ID NO: 580 - DNA, 15 bp, Artificial Sequence
  Antisense nucleotide
ccagtggagacctgg

SEQ ID NO: 581 - DNA, 17 bp, Artificial Sequence
  Antisense nucleotide
cctgaggacacatcagg

SEQ ID NO: 582 - DNA, 18 bp, Artificial Sequence
  Antisense nucleotide
cctcacttggttgtgagc

SEQ ID NO: 583 - DNA, 15 bp, Artificial Sequence
  Antisense nucleotide
ggaagatgtccttcc

SEQ ID NO: 584 - DNA, 16 bp, Artificial Sequence
  Antisense nucleotide
gcacactgctcatggc

SEQ ID NO: 585 - DNA, 15 bp, Artificial Sequence
  Antisense nucleotide
gctgtcacctcttgg

SEQ ID NO: 586 - DNA, 14 bp, Artificial Sequence
  Antisense nucleotide
cctctgctgtcacc

SEQ ID NO: 587 - DNA, 16 bp, Artificial Sequence
  Antisense nucleotide
ccacacatcactctgg

SEQ ID NO: 588 - DNA, 15 bp, Artificial Sequence
  Antisense nucleotide
cctcctcttcagagg

SEQ ID NO: 589 - DNA, 18 bp, Artificial Sequence
  Antisense nucleotide
ccttctggttcacactgg

SEQ ID NO: 590 - DNA, 16 bp, Artificial Sequence
  Antisense nucleotide
catggtgctcactgcg

SEQ ID NO: 591 - DNA, 14 bp, Artificial Sequence
  Antisense nucleotide
cttggttgtgagcg

SEQ ID NO: 592 - DNA, 14 bp, Artificial Sequence
  Antisense nucleotide
ggacaggcagtcac

SEQ ID NO: 593 - DNA, 18 bp, Artificial Sequence
  Antisense nucleotide
gtcacctcttggttgtgc

SEQ ID NO: 594 - DNA, 16 bp, Artificial Sequence
  Antisense nucleotide
ccagagtctcaaacac

SEQ ID NO: 595 - DNA, 14 bp, Artificial Sequence
  Antisense nucleotide
cacatactccctgg

SEQ ID NO: 596 - DNA, 15 bp, Artificial Sequence
  Antisense nucleotide
gaccagcacgttccg

SEQ ID NO: 597 - DNA, 17 bp, Artificial Sequence
  Antisense nucleotide
gttggtgtctatcagtg

SEQ ID NO: 598 - DNA, 14 bp, Artificial Sequence
  Antisense nucleotide
ccctggtagaggtg

SEQ ID NO: 599 - DNA, 16 bp, Artificial Sequence
  Antisense nucleotide
ctcaaacacttggagc

SEQ ID NO: 600 - DNA, 18 bp, Artificial Sequence
  Antisense nucleotide
cacacatcactctggtgg

SEQ ID NO: 601 - DNA, 15 bp, Artificial Sequence
  Antisense nucleotide
gcacagacagtgcgc

SEQ ID NO: 602 - DNA, 15 bp, Artificial Sequence
  Antisense nucleotide
catggcagcagtcag

SEQ ID NO: 603 - DNA, 16 bp, Artificial Sequence
  Antisense nucleotide
ctgctcatggcagcag

SEQ ID NO: 604 - DNA, 20 bp, Artificial Sequence
  Antisense nucleotide
catctggaaacttccagatg

SEQ ID NO: 605 - DNA, 14 bp, Artificial Sequence
  Antisense nucleotide
ctggaaacttccag

SEQ ID NO: 606 - DNA, 20 bp, Artificial Sequence
  Antisense nucleotide
cataactccacacatcactc

SEQ ID NO: 607 - DNA, 19 bp, Artificial Sequence
  Antisense nucleotide
caccataactccacacatc

SEQ ID NO: 608 - DNA, 14 bp, Artificial Sequence
  Antisense nucleotide
ctggtgggtgaacc

SEQ ID NO: 609 - DNA, 15 bp, Artificial Sequence
  Antisense nucleotide
cggattacttgcagg

SEQ ID NO: 610 - DNA, 15 bp, Artificial Sequence
  Antisense nucleotide
cgctaggtgtcagcg

SEQ ID NO: 611 - DNA, 14 bp, Artificial Sequence
  Antisense nucleotide
gccatcacgtatgc

SEQ ID NO: 612 - DNA, 17 bp, Artificial Sequence
  Antisense nucleotide
gcatacaccagttcagc

SEQ ID NO: 613 - DNA, 16 bp, Artificial Sequence
  Antisense nucleotide
ccatcaaatacatcgg

SEQ ID NO: 614 - DNA, 15 bp, Artificial Sequence
  Antisense nucleotide
ccagcagaagtcagg

SEQ ID NO: 615 - DNA, 15 bp, Artificial Sequence
  Antisense nucleotide
gcttcatgtctgtgc

SEQ ID NO: 616 - DNA, 18 bp, Artificial Sequence
  Antisense nucleotide
ggtgagttccaggtttcc

SEQ ID NO: 617 - DNA, 19 bp, Artificial Sequence
  Antisense nucleotide
ccacaaaatcgtgtcctgg

SEQ ID NO: 618 - DNA, 14 bp, Artificial Sequence
  Antisense nucleotide
cccttacacatcgg

SEQ ID NO: 619 - DNA, 15 bp, Artificial Sequence
  Antisense nucleotide
gcagctcacagatgc

SEQ ID NO: 620 - DNA, 14 bp, Artificial Sequence
  Antisense nucleotide
gcactggtaactgc

SEQ ID NO: 621 - DNA, 18 bp, Artificial Sequence
  Antisense nucleotide
cctggatattggcactgg

SEQ ID NO: 622 - DNA, 15 bp, Artificial Sequence
  Antisense nucleotide
ccagcaaactcctgg

SEQ ID NO: 623 - DNA, 15 bp, Artificial Sequence
  Antisense nucleotide
gcagaaatgccaggc

SEQ ID NO: 624 - DNA, 17 bp, Artificial Sequence
  Antisense nucleotide
ccattgtgcagaattcg

SEQ ID NO: 625 - DNA, 15 bp, Artificial Sequence
  Antisense nucleotide
ccctgcagtactcgg

SEQ ID NO: 626 - DNA, 17 bp, Artificial Sequence
  Antisense nucleotide
ggcattcacatactccc

SEQ ID NO: 627 - DNA, 16 bp, Artificial Sequence
  Antisense nucleotide
ggtcaggtttcacacc

SEQ ID NO: 628 - DNA, 15 bp, Artificial Sequence
  Antisense nucleotide
ccaggtccacacagg

SEQ ID NO: 629 - DNA, 14 bp, Artificial Sequence
  Antisense nucleotide
ccttgtcatccagg

SEQ ID NO: 630 - DNA, 14 bp, Artificial Sequence
  Antisense nucleotide
ggatcccaaagacc

SEQ ID NO: 631 - DNA, 17 bp, Artificial Sequence
  Antisense nucleotide
cctcaacactttgatgg

SEQ ID NO: 632 - DNA, 14 bp, Artificial Sequence
  Antisense nucleotide
gctgtgtcaccagc

SEQ ID NO: 633 - DNA, 16 bp, Artificial Sequence
  Antisense nucleotide
ggtctaagaggcagcc

SEQ ID NO: 634 - DNA, 17 bp, Artificial Sequence
  Antisense nucleotide
ggcaatctgcatacacc

SEQ ID NO: 635 - DNA, 14 bp, Artificial Sequence
  Antisense nucleotide
cctgtgtacgagcc

SEQ ID NO: 636 - DNA, 15 bp, Artificial Sequence
  Antisense nucleotide
ccatccacttgatgg

SEQ ID NO: 637 - DNA, 16 bp, Artificial Sequence
  Antisense nucleotide
cccacacagtcacacc

SEQ ID NO: 638 - DNA, 16 bp, Artificial Sequence
  Antisense nucleotide
ccatcgtaaggtttgg

SEQ ID NO: 639 - DNA, 14 bp, Artificial Sequence
  Antisense nucleotide
ccttttccagcagg

SEQ ID NO: 640 - DNA, 16 bp, Artificial Sequence
  Antisense nucleotide
ggagaattcagacacc

SEQ ID NO: 641 - DNA, 17 bp, Artificial Sequence
  Antisense nucleotide
ccaagtcctcattctgg

SEQ ID NO: 642 - DNA, 16 bp, Artificial Sequence
  Antisense nucleotide
ccatcagtctcagagg

SEQ ID NO: 643 - DNA, 16 bp, Artificial Sequence
  Antisense nucleotide
cctttgaaggtgctgg

SEQ ID NO: 644 - DNA, 15 bp, Artificial Sequence
  Antisense nucleotide
ggcatggcaggttcc

SEQ ID NO: 645 - DNA, 14 bp, Artificial Sequence
  Antisense nucleotide
cctggcatggcagg

SEQ ID NO: 646 - DNA, 14 bp, Artificial Sequence
  Antisense nucleotide
agatgtataggtaa

SEQ ID NO: 647 - DNA, 14 bp, Artificial Sequence
  Antisense nucleotide
attttcacattctc

SEQ ID NO: 648 - DNA, 15 bp, Artificial Sequence
  Antisense nucleotide
aattttcacattctc

SEQ ID NO: 649 - DNA, 14 bp, Artificial Sequence
  Antisense nucleotide
aattttcacattct

SEQ ID NO: 650 - DNA, 14 bp, Artificial Sequence
  Antisense nucleotide
gaattttcacattc

SEQ ID NO: 651 - DNA, 14 bp, Artificial Sequence
  Antisense nucleotide
ggaattttcacatt

SEQ ID NO: 652 - DNA, 14 bp, Artificial Sequence
  Antisense nucleotide
agatttctttgttg

SEQ ID NO: 653 - DNA, 15 bp, Artificial Sequence
  Antisense nucleotide
aagatttctttgttg

SEQ ID NO: 654 - DNA, 14 bp, Artificial Sequence
  Antisense nucleotide
aagatttctttgtt

SEQ ID NO: 655 - DNA, 15 bp, Artificial Sequence
  Antisense nucleotide
taagatttctttgtt

SEQ ID NO: 656 - DNA, 16 bp, Artificial Sequence
  Antisense nucleotide
ctaagatttctttgtt

SEQ ID NO: 657 - DNA, 14 bp, Artificial Sequence
  Antisense nucleotide
taagatttctttgt

SEQ ID NO: 658 - DNA, 15 bp, Artificial Sequence
  Antisense nucleotide
ctaagatttctttgt

SEQ ID NO: 659 - DNA, 14 bp, Artificial Sequence
  Antisense nucleotide
ctaagatttctttg

SEQ ID NO: 660 - DNA, 14 bp, Artificial Sequence
  Antisense nucleotide
tctaagatttcttt

SEQ ID NO: 661 - DNA, 15 bp, Artificial Sequence
  Antisense nucleotide
gtctaagatttcttt

SEQ ID NO: 662 - DNA, 14 bp, Artificial Sequence
  Antisense nucleotide
gtctaagatttctt

SEQ ID NO: 663 - DNA, 14 bp, Artificial Sequence
  Antisense nucleotide
ttcgtctaagattt

SEQ ID NO: 664 - DNA, 14 bp, Artificial Sequence
  Antisense nucleotide
attttgacatggtt

SEQ ID NO: 665 - DNA, 15 bp, Artificial Sequence
  Antisense nucleotide
aattttgacatggtt

SEQ ID NO: 666 - DNA, 14 bp, Artificial Sequence
  Antisense nucleotide
aattttgacatggt

SEQ ID NO: 667 - DNA, 15 bp, Artificial Sequence
  Antisense nucleotide
taattttgacatggt

SEQ ID NO: 668 - DNA, 14 bp, Artificial Sequence
  Antisense nucleotide
taattttgacatgg

SEQ ID NO: 669 - DNA, 14 bp, Artificial Sequence
  Antisense nucleotide
gtaattttgacatg

SEQ ID NO: 670 - DNA, 15 bp, Artificial Sequence
  Antisense nucleotide
tgtaattttgacatg

SEQ ID NO: 671 - DNA, 14 bp, Artificial Sequence
  Antisense nucleotide
tgtaattttgacat

SEQ ID NO: 672 - DNA, 16 bp, Artificial Sequence
  Antisense nucleotide
tctgtaattttgacat

SEQ ID NO: 673 - DNA, 14 bp, Artificial Sequence
  Antisense nucleotide
ctgtaattttgaca

SEQ ID NO: 674 - DNA, 15 bp, Artificial Sequence
  Antisense nucleotide
tctgtaattttgaca

SEQ ID NO: 675 - DNA, 14 bp, Artificial Sequence
  Antisense nucleotide
tctgtaattttgac

SEQ ID NO: 676 - DNA, 14 bp, Artificial Sequence
  Antisense nucleotide
gtctgtaattttga

SEQ ID NO: 677 - DNA, 16 bp, Artificial Sequence
  Antisense nucleotide
aagtctgtaattttga

SEQ ID NO: 678 - DNA, 14 bp, Artificial Sequence
  Antisense nucleotide
agtctgtaattttg

SEQ ID NO: 679 - DNA, 15 bp, Artificial Sequence
  Antisense nucleotide
aagtctgtaattttg

SEQ ID NO: 680 - DNA, 14 bp, Artificial Sequence
  Antisense nucleotide
aagtctgtaatttt

SEQ ID NO: 681 - DNA, 15 bp, Artificial Sequence
  Antisense nucleotide
gaagtctgtaatttt

SEQ ID NO: 682 - DNA, 14 bp, Artificial Sequence
  Antisense nucleotide
gaagtctgtaattt

SEQ ID NO: 683 - DNA, 14 bp, Artificial Sequence
  Antisense nucleotide
atgtagacatcaat

SEQ ID NO: 684 - DNA, 14 bp, Artificial Sequence
  Antisense nucleotide
atcatccaacattt

SEQ ID NO: 685 - DNA, 15 bp, Artificial Sequence
  Antisense nucleotide
aatcatccaacattt

SEQ ID NO: 686 - DNA, 14 bp, Artificial Sequence
  Antisense nucleotide
aatcatccaacatt

SEQ ID NO: 687 - DNA, 14 bp, Artificial Sequence
  Antisense nucleotide
accatcaaatacat

SEQ ID NO: 688 - DNA, 14 bp, Artificial Sequence
  Antisense nucleotide
aaaaacgtctttga

SEQ ID NO: 689 - DNA, 15 bp, Artificial Sequence
  Antisense nucleotide
ttttgttcttagaca

SEQ ID NO: 690 - DNA, 14 bp, Artificial Sequence
  Antisense nucleotide
ttttgttcttagac

SEQ ID NO: 691 - DNA, 14 bp, Artificial Sequence
  Antisense nucleotide
taaacagaaaagca

SEQ ID NO: 692 - DNA, 14 bp, Artificial Sequence
  Antisense nucleotide
actaaacagaaaag

SEQ ID NO: 693 - DNA, 16 bp, Artificial Sequence
  Antisense nucleotide
aaactaaacagaaaag

SEQ ID NO: 694 - DNA, 14 bp, Artificial Sequence
  Antisense nucleotide
aactaaacagaaaa

SEQ ID NO: 695 - DNA, 15 bp, Artificial Sequence
  Antisense nucleotide
aaactaaacagaaaa

SEQ ID NO: 696 - DNA, 14 bp, Artificial Sequence
  Antisense nucleotide
aaactaaacagaaa

SEQ ID NO: 697 - DNA, 17 bp, Artificial Sequence
  Antisense nucleotide
taaaaactaaacagaaa

SEQ ID NO: 698 - DNA, 14 bp, Artificial Sequence
  Antisense nucleotide
aaaactaaacagaa

SEQ ID NO: 699 - DNA, 17 bp, Artificial Sequence
  Antisense nucleotide
gtaaaaactaaacagaa

SEQ ID NO: 700 - DNA, 14 bp, Artificial Sequence
  Antisense nucleotide
aaaaactaaacaga

SEQ ID NO: 701 - DNA, 15 bp, Artificial Sequence
  Antisense nucleotide
taaaaactaaacaga

SEQ ID NO: 702 - DNA, 14 bp, Artificial Sequence
  Antisense nucleotide
taaaaactaaacag

SEQ ID NO: 703 - DNA, 14 bp, Artificial Sequence
  Antisense nucleotide
gtaaaaactaaaca

SEQ ID NO: 704 - DNA, 19 bp, Artificial Sequence
  Antisense nucleotide
aaaaagtaaaaactaaaca

SEQ ID NO: 705 - DNA, 14 bp, Artificial Sequence
  Antisense nucleotide
agtaaaaactaaac

SEQ ID NO: 706 - DNA, 20 bp, Artificial Sequence
  Antisense nucleotide
aaaaaaagtaaaaactaaac

SEQ ID NO: 707 - DNA, 14 bp, Artificial Sequence
  Antisense nucleotide
aagtaaaaactaaa

SEQ ID NO: 708 - DNA, 19 bp, Artificial Sequence
  Antisense nucleotide
aaaaaaagtaaaaactaaa

SEQ ID NO: 709 - DNA, 14 bp, Artificial Sequence
  Antisense nucleotide
aaagtaaaaactaa

SEQ ID NO: 710 - DNA, 14 bp, Artificial Sequence
  Antisense nucleotide
aaaagtaaaaacta

SEQ ID NO: 711 - DNA, 17 bp, Artificial Sequence
  Antisense nucleotide
aaaaaaagtaaaaacta

SEQ ID NO: 712 - DNA, 14 bp, Artificial Sequence
  Antisense nucleotide
aaaaagtaaaaact

SEQ ID NO: 713 - DNA, 16 bp, Artificial Sequence
  Antisense nucleotide
aaaaaaagtaaaaact

SEQ ID NO: 714 - DNA, 15 bp, Artificial Sequence
  Antisense nucleotide
aaaaaaagtaaaaac

SEQ ID NO: 715 - DNA, 16 bp, Artificial Sequence
  Antisense nucleotide
caaaaaaagtaaaaac

SEQ ID NO: 716 - DNA, 14 bp, Artificial Sequence
  Antisense nucleotide
aaaaaaagtaaaaa

SEQ ID NO: 717 - DNA, 14 bp, Artificial Sequence
  Antisense nucleotide
caaaaaaagtaaaa

SEQ ID NO: 718 - DNA, 20 bp, Artificial Sequence
  Antisense nucleotide
aacaaaacaaaaaaagtaaa

SEQ ID NO: 719 - DNA, 14 bp, Artificial Sequence
  Antisense nucleotide
aaacaaaaaaagta

SEQ ID NO: 720 - DNA, 16 bp, Artificial Sequence
  Antisense nucleotide
caaaacaaaaaaagta

SEQ ID NO: 721 - DNA, 15 bp, Artificial Sequence
  Antisense nucleotide
caaaacaaaaaaagt

SEQ ID NO: 722 - DNA, 14 bp, Artificial Sequence
  Antisense nucleotide
caaaacaaaaaaag

SEQ ID NO: 723 - DNA, 17 bp, Artificial Sequence
  Antisense nucleotide
ctttaaaaaaacaaaac

SEQ ID NO: 724 - DNA, 16 bp, Artificial Sequence
  Antisense nucleotide
tctttaaaaaaacaaa

SEQ ID NO: 725 - DNA, 17 bp, Artificial Sequence
  Antisense nucleotide
gtctttaaaaaaacaaa

SEQ ID NO: 726 - DNA, 15 bp, Artificial Sequence
  Antisense nucleotide
gtctttaaaaaaaca

SEQ ID NO: 727 - DNA, 14 bp, Artificial Sequence
  Antisense nucleotide
gtctttaaaaaaac

SEQ ID NO: 728 - DNA, 14 bp, Artificial Sequence
  Antisense nucleotide
tttatttcgtcttt

SEQ ID NO: 729 - DNA, 14 bp, Artificial Sequence
  Antisense nucleotide
tctttatttcgtct

SEQ ID NO: 730 - DNA, 14 bp, Artificial Sequence
  Antisense nucleotide
tatttgcaaatgga

SEQ ID NO: 731 - DNA, 15 bp, Artificial Sequence
  Antisense nucleotide
tatatttgcaaatgg

SEQ ID NO: 732 - DNA, 14 bp, Artificial Sequence
  Antisense nucleotide
tatatttgcaaatg

SEQ ID NO: 733 - DNA, 19 bp, Artificial Sequence
  Antisense nucleotide
caaaatatatttgcaaatg

SEQ ID NO: 734 - DNA, 18 bp, Artificial Sequence
  Antisense nucleotide
caaaatatatttgcaaat

SEQ ID NO: 735 - DNA, 15 bp, Artificial Sequence
  Antisense nucleotide
caaaatatatttgca

SEQ ID NO: 736 - DNA, 14 bp, Artificial Sequence
  Antisense nucleotide
caaaatatatttgc

SEQ ID NO: 737 - DNA, 16 bp, Artificial Sequence
  Antisense nucleotide
ttccaaaatatatttg

SEQ ID NO: 738 - DNA, 17 bp, Artificial Sequence
  Antisense nucleotide
ttttccaaaatatattt

SEQ ID NO: 739 - DNA, 17 bp, Artificial Sequence
  Antisense nucleotide
gttttccaaaatatatt

SEQ ID NO: 740 - DNA, 14 bp, Artificial Sequence
  Antisense nucleotide
gttttccaaaatat

SEQ ID NO: 741 - DNA, 14 bp, Artificial Sequence
  Antisense nucleotide
ggttaggcaaagcc

SEQ ID NO: 742 - DNA, 18 bp, Artificial Sequence
  Antisense nucleotide
ccgagaacatcatcgtgg

SEQ ID NO: 743 - DNA, 17 bp, Artificial Sequence
  Antisense nucleotide
ccgagaacatcatcgtg

SEQ ID NO: 744 - DNA, 15 bp, Artificial Sequence
  Antisense nucleotide
ccgagaacatcatcg

SEQ ID NO: 745 - DNA, 18 bp, Artificial Sequence
  Antisense nucleotide
cgtagtctgcgttgaagc

SEQ ID NO: 746 - DNA, 15 bp, Artificial Sequence
  Antisense nucleotide
ccatgctggagaagg

SEQ ID NO: 747 - DNA, 14 bp, Artificial Sequence
  Antisense nucleotide
ccgtgcagaagtcc

SEQ ID NO: 748 - DNA, 14 bp, Artificial Sequence
  Antisense nucleotide
ggaatgaagttggc

SEQ ID NO: 749 - DNA, 14 bp, Artificial Sequence
  Antisense nucleotide
tgaccgtgggaatg

SEQ ID NO: 750 - DNA, 14 bp, Artificial Sequence
  Antisense nucleotide
tggcagtgaccgtg

SEQ ID NO: 751 - DNA, 14 bp, Artificial Sequence
  Antisense nucleotide
agatggcagtgacc

SEQ ID NO: 752 - DNA, 16 bp, Artificial Sequence
  Antisense nucleotide
cgagatggcagtgacc

SEQ ID NO: 753 - DNA, 14 bp, Artificial Sequence
  Antisense nucleotide
ccagccactgcagg

SEQ ID NO: 754 - DNA, 14 bp, Artificial Sequence
  Antisense nucleotide
gcaccagccactgc

SEQ ID NO: 755 - DNA, 14 bp, Artificial Sequence
  Antisense nucleotide
ccctggagtaagcc

SEQ ID NO: 756 - DNA, 18 bp, Artificial Sequence
  Antisense nucleotide
ggagataactgttccacc

SEQ ID NO: 757 - DNA, 15 bp, Artificial Sequence
  Antisense nucleotide
ggagataactgttcc

SEQ ID NO: 758 - DNA, 15 bp, Artificial Sequence
  Antisense nucleotide
cttctagttggtctg

SEQ ID NO: 759 - DNA, 14 bp, Artificial Sequence
  Antisense nucleotide
catcttctagttgg

SEQ ID NO: 760 - DNA, 17 bp, Artificial Sequence
  Antisense nucleotide
tctcatcttctagttgg

SEQ ID NO: 761 - DNA, 18 bp, Artificial Sequence
  Antisense nucleotide
ctgcaaagcagacttctc

SEQ ID NO: 762 - DNA, 15 bp, Artificial Sequence
  Antisense nucleotide
ccttcagcaggttgg

SEQ ID NO: 763 - DNA, 14 bp, Artificial Sequence
  Antisense nucleotide
cccaggtcatcagg

SEQ ID NO: 764 - DNA, 15 bp, Artificial Sequence
  Antisense nucleotide
ccagtcagatcaagg

SEQ ID NO: 765 - DNA, 15 bp, Artificial Sequence
  Antisense nucleotide
ggtgaaggcctcctc

SEQ ID NO: 766 - DNA, 15 bp, Artificial Sequence
  Antisense nucleotide
cagggtgaaggcctc

SEQ ID NO: 767 - DNA, 15 bp, Artificial Sequence
  Antisense nucleotide
cctggatgatgctgg

SEQ ID NO: 768 - DNA, 14 bp, Artificial Sequence
  Antisense nucleotide
ccactgtgcagagg

SEQ ID NO: 769 - DNA, 15 bp, Artificial Sequence
  Antisense nucleotide
ggagtacaggtgacc

SEQ ID NO: 770 - DNA, 15 bp, Artificial Sequence
  Antisense nucleotide
gctcattgctgctgc

SEQ ID NO: 771 - DNA, 17 bp, Artificial Sequence
  Antisense nucleotide
ggaaggctcattgctgc

SEQ ID NO: 772 - DNA, 14 bp, Artificial Sequence
  Antisense nucleotide
ttttctcttcttct

SEQ ID NO: 773 - DNA, 14 bp, Artificial Sequence
  Antisense nucleotide
atcttattcctttc

SEQ ID NO: 774 - DNA, 14 bp, Artificial Sequence
  Antisense nucleotide
catcttattccttt

SEQ ID NO: 775 - DNA, 14 bp, Artificial Sequence
  Antisense nucleotide
tagtttttccttct

SEQ ID NO: 776 - DNA, 14 bp, Artificial Sequence
  Antisense nucleotide
tctagtttttcctt

SEQ ID NO: 777 - DNA, 14 bp, Artificial Sequence
  Antisense nucleotide
aactctagtttttc

SEQ ID NO: 778 - DNA, 14 bp, Artificial Sequence
  Antisense nucleotide
gaactctagttttt

SEQ ID NO: 779 - DNA, 15 bp, Artificial Sequence
  Antisense nucleotide
tgaactctagttttt

SEQ ID NO: 780 - DNA, 16 bp, Artificial Sequence
  Antisense nucleotide
atgaactctagttttt

SEQ ID NO: 781 - DNA, 14 bp, Artificial Sequence
  Antisense nucleotide
tgaactctagtttt

SEQ ID NO: 782 - DNA, 15 bp, Artificial Sequence
  Antisense nucleotide
atgaactctagtttt

SEQ ID NO: 783 - DNA, 14 bp, Artificial Sequence
  Antisense nucleotide
atgaactctagttt

SEQ ID NO: 784 - DNA, 14 bp, Artificial Sequence
  Antisense nucleotide
gcacacagtagtgc

SEQ ID NO: 785 - DNA, 16 bp, Artificial Sequence
  Antisense nucleotide
gcaggatcagaaaagc

SEQ ID NO: 786 - DNA, 14 bp, Artificial Sequence
  Antisense nucleotide
gcaggtagacaggc

SEQ ID NO: 787 - DNA, 17 bp, Artificial Sequence
  Antisense nucleotide
gcttgctcaggatctgc

SEQ ID NO: 788 - DNA, 15 bp, Artificial Sequence
  Antisense nucleotide
gcaagtccctggtgc

SEQ ID NO: 789 - DNA, 14 bp, Artificial Sequence
  Antisense nucleotide
cctggagcaagtcc

SEQ ID NO: 790 - DNA, 17 bp, Artificial Sequence
  Antisense nucleotide
cgtagtactcttcgtcg

SEQ ID NO: 791 - DNA, 14 bp, Artificial Sequence
  Antisense nucleotide
cgtagtactcttcg

SEQ ID NO: 792 - DNA, 14 bp, Artificial Sequence
  Antisense nucleotide
gtaaacctccttgg

SEQ ID NO: 793 - DNA, 19 bp, Artificial Sequence
  Antisense nucleotide
gtctattttgtaaacctcc

SEQ ID NO: 794 - DNA, 20 bp, Artificial Sequence
  Antisense nucleotide
gcatgtctattttgtaaacc

SEQ ID NO: 795 - DNA, 15 bp, Artificial Sequence
  Antisense nucleotide
ggcatcaaggtaccc

SEQ ID NO: 796 - DNA, 14 bp, Artificial
  Antisense nucleotide
ggcatcaaggtacc

SEQ ID NO: 797 - DNA, 20 bp, Artificial Sequence
  Antisense nucleotide
gctttcaccaaattggaagc

SEQ ID NO: 798 - DNA, 18 bp, Artificial Sequence
  Antisense nucleotide
gagaatctgatatagctc

SEQ ID NO: 799 - DNA, 19 bp, Artificial Sequence
  Antisense nucleotide
ggagatgttaaatctttgg

SEQ ID NO: 800 - DNA, 14 bp, Artificial
  Antisense nucleotide
gctgtcgatgtagc

SEQ ID NO: 801 - DNA, 20 bp, Artificial
  Antisense nucleotide
ccaggttcctgtctttatgg

SEQ ID NO: 802 - DNA, 14 bp, Artificial Sequence
  Antisense nucleotide
cagcagggacagtg

SEQ ID NO: 803 - DNA, 19 bp, Artificial Sequence
  Antisense nucleotide
cttgcttctagttcttcac

SEQ ID NO: 804 - DNA, 15 bp, Artificial Sequence
  Antisense nucleotide
gccatcaatacctgc

SEQ ID NO: 805 - DNA, 15 bp, Artificial Sequence
  Antisense nucleotide
ggtgccatcaatacc

SEQ ID NO: 806 - DNA, 16 bp, Artificial Sequence
  Antisense nucleotide
ccactggtatatgtgg

SEQ ID NO: 807 - DNA, 18 bp, Artificial Sequence
  Antisense nucleotide
ggactttatagttttctg

SEQ ID NO: 808 - DNA, 16 bp, Artificial Sequence
  Antisense nucleotide
ctcaagtctgtaggag

SEQ ID NO: 809 - DNA, 15 bp, Artificial Sequence
  Antisense nucleotide
ggtctgttgtgactc

SEQ ID NO: 810 - DNA, 19 bp, Artificial Sequence
  Antisense nucleotide
caattatcctgcacatttc

SEQ ID NO: 811 - DNA, 16 bp, Artificial Sequence
  Antisense nucleotide
gcagcaattatcctgc

SEQ ID NO: 812 - DNA, 14 bp, Artificial Sequence
  Antisense nucleotide
ggcagcaattatcc

SEQ ID NO: 813 - DNA, 19 bp, Artificial Sequence
  Antisense nucleotide
ggttcgtgtatccatttcc

SEQ ID NO: 814 - DNA, 14 bp, Artificial Sequence
  Antisense nucleotide
gcacagaagttggc

SEQ ID NO: 815 - DNA, 16 bp, Artificial Sequence
  Antisense nucleotide
ccagcacagaagttgg

SEQ ID NO: 816 - DNA, 14 bp, Artificial Sequence
  Antisense nucleotide
gtgctgagtgtctg

SEQ ID NO: 817 - DNA, 16 bp, Artificial Sequence
  Antisense nucleotide
cctgctgtgctgagtg

SEQ ID NO: 818 - DNA, 14 bp, Artificial Sequence
  Antisense nucleotide
gctcaggaccctgc

SEQ ID NO: 819 - DNA, 15 bp, Artificial Sequence
  Antisense nucleotide
gcagcaaggagaagc

SEQ ID NO: 820 - DNA, 19 bp, Artificial Sequence
  Antisense nucleotide
ccaatgtagtagagaatgg

SEQ ID NO: 821 - DNA, 14 bp, Artificial Sequence
  Antisense nucleotide
gctgcatttgcaag

SEQ ID NO: 822 - DNA, 14 bp, Artificial Sequence
  Antisense nucleotide
aaaaaagaaatcaa

SEQ ID NO: 823 - DNA, 15 bp, Artificial Sequence
  Antisense nucleotide
aaaaaaagaaatcaa

SEQ ID NO: 824 - DNA, 16 bp, Artificial Sequence
  Antisense nucleotide
aaaaaaaagaaatcaa

SEQ ID NO: 825 - DNA, 17 bp, Artificial Sequence
  Antisense nucleotide
taaaaaaaagaaatcaa

SEQ ID NO: 826 - DNA, 18 bp, Artificial Sequence
  Antisense nucleotide
ataaaaaaaagaaatcaa

SEQ ID NO: 827 - DNA, 19 bp, Artificial Sequence
  Antisense nucleotide
aataaaaaaaagaaatcaa

SEQ ID NO: 828 - DNA, 17 bp, Artificial Sequence
  Antisense nucleotide
gaataaaaaaaagaaat

SEQ ID NO: 829 - DNA, 18 bp, Artificial Sequence
  Antisense nucleotide
agaataaaaaaaagaaat

SEQ ID NO: 830 - DNA, 14 bp, Artificial Sequence
  Antisense nucleotide
cagaataaaaaaaa

SEQ ID NO: 831 - DNA, 14 bp, Artificial Sequence
  Antisense nucleotide
tcagaataaaaaaa

SEQ ID NO: 832 - DNA, 14 bp, Artificial Sequence
  Antisense nucleotide
ttgtttttaaaagt

SEQ ID NO: 833 - DNA, 14 bp, Artificial Sequence
  Antisense nucleotide
agttgtttttaaaa

SEQ ID NO: 834 - DNA, 15 bp, Artificial Sequence
  Antisense nucleotide
aagttgtttttaaaa

SEQ ID NO: 835 - DNA, 16 bp, Artificial Sequence
  Antisense nucleotide
aaagttgtttttaaaa

SEQ ID NO: 836 - DNA, 17 bp, Artificial Sequence
  Antisense nucleotide
aaaagttgtttttaaaa

SEQ ID NO: 837 - DNA, 18 bp, Artificial Sequence
  Antisense nucleotide
aaaaagttgtttttaaaa

SEQ ID NO: 838 - DNA, 19 bp, Artificial Sequence
  Antisense nucleotide
aaaaaagttgtttttaaaa

SEQ ID NO: 839 - DNA, 20 bp, Artificial Sequence
  Antisense nucleotide
aaaaaaagttgtttttaaaa

SEQ ID NO: 840 - DNA, 20 bp, Artificial Sequence
  Antisense nucleotide
aaaaaaaagttgtttttaaa

SEQ ID NO: 841 - DNA, 14 bp, Artificial Sequence
  Antisense nucleotide
tttttaaaaaagtg

SEQ ID NO: 842 - DNA, 15 bp, Artificial Sequence
  Antisense nucleotide
ttttttaaaaaagtg

SEQ ID NO: 843 - DNA, 16 bp, Artificial Sequence
  Antisense nucleotide
attttttaaaaaagtg

SEQ ID NO: 844 - DNA, 16 bp, Artificial Sequence
  Antisense nucleotide
cattttttaaaaaagt

SEQ ID NO: 845 - DNA, 15 bp, Artificial Sequence
  Antisense nucleotide
gcattttttaaaaaa

SEQ ID NO: 846 - DNA, 16 bp, Artificial Sequence
  Antisense nucleotide
tgcattttttaaaaaa

SEQ ID NO: 847 - DNA, 14 bp, Artificial Sequence
  Antisense nucleotide
agcttattttaaat

SEQ ID NO: 848 - DNA, 15 bp, Artificial Sequence
  Antisense nucleotide
aagcttattttaaat

SEQ ID NO: 849 - DNA, 16 bp, Artificial Sequence
  Antisense nucleotide
taagcttattttaaat

SEQ ID NO: 850 - DNA, 14 bp, Artificial Sequence
  Antisense nucleotide
tgtaattattagat

SEQ ID NO: 851 - DNA, 15 bp, Artificial Sequence
  Antisense nucleotide
atgtaattattagat

SEQ ID NO: 852 - DNA, 14 bp, Artificial Sequence
  Antisense nucleotide
tgatgtaattatta

SEQ ID NO: 853 - DNA, 15 bp, Artificial Sequence
  Antisense nucleotide
atgatgtaattatta

SEQ ID NO: 854 - DNA, 14 bp, Artificial Sequence
  Antisense nucleotide
atggtattatataa

SEQ ID NO: 855 - DNA, 15 bp, Artificial Sequence
  Antisense nucleotide
tatggtattatataa

SEQ ID NO: 856 - DNA, 16 bp, Artificial Sequence
  Antisense nucleotide
ttatggtattatataa

SEQ ID NO: 857 - DNA, 17 bp, Artificial Sequence
  Antisense nucleotide
tttatggtattatataa

SEQ ID NO: 858 - DNA, 18 bp, Artificial Sequence
  Antisense nucleotide
atttatggtattatataa

SEQ ID NO: 859 - DNA, 14 bp, Artificial Sequence
  Antisense nucleotide
aatcatattagaaa

SEQ ID NO: 860 - DNA, 14 bp, Artificial Sequence
  Antisense nucleotide
ttacaatcatatta

SEQ ID NO: 861 - DNA, 15 bp, Artificial Sequence
  Antisense nucleotide
tttacaatcatatta

SEQ ID NO: 862 - DNA, 16 bp, Artificial Sequence
  Antisense nucleotide
ggcatgacgcctttcc

SEQ ID NO: 863 - DNA, 14 bp, Artificial Sequence
  Antisense nucleotide
gcatgacgcctttc

SEQ ID NO: 864 - DNA, 14 bp, Artificial Sequence
  Antisense nucleotide
gcctgacgagaggc

SEQ ID NO: 865 - DNA, 15 bp, Artificial Sequence
  Antisense nucleotide
ctcaagcctgacgag

SEQ ID NO: 866 - DNA, 16 bp, Artificial Sequence
  Antisense nucleotide
ccacagttcctttttc

SEQ ID NO: 867 - DNA, 18 bp, Artificial Sequence
  Antisense nucleotide
gctgcaataaagatacag

SEQ ID NO: 868 - DNA, 16 bp, Artificial Sequence
  Antisense nucleotide
gctgcaataaagatac

SEQ ID NO: 869 - DNA, 17 bp, Artificial Sequence
  Antisense nucleotide
ggacactgatttctatg

SEQ ID NO: 870 - DNA, 16 bp, Artificial Sequence
  Antisense nucleotide
gcattatcaactttgg

SEQ ID NO: 871 - DNA, 16 bp, Artificial Sequence
  Antisense nucleotide
acttttagcaccaatg

SEQ ID NO: 872 - DNA, 19 bp, Artificial Sequence
  Antisense nucleotide
ccaagaaacttttagcacc

SEQ ID NO: 873 - DNA, 14 bp, Artificial Sequence
  Antisense nucleotide
ccagatcatcttcc

SEQ ID NO: 874 - DNA, 16 bp, Artificial Sequence
  Antisense nucleotide
agtcaaggacacatag

SEQ ID NO: 875 - DNA, 16 bp, Artificial Sequence
  Antisense nucleotide
tctttgagcaacatgg

SEQ ID NO: 876 - DNA, 14 bp, Artificial Sequence
  Antisense nucleotide
gggtataacagctg

SEQ ID NO: 877 - DNA, 18 bp, Artificial Sequence
  Antisense nucleotide
gaggtgaaccattaatgg

SEQ ID NO: 878 - DNA, 16 bp, Artificial Sequence
  Antisense nucleotide
tcttcgtatcgtttag

SEQ ID NO: 879 - DNA, 15 bp, Artificial Sequence
  Antisense nucleotide
tgttggatagtgttc

SEQ ID NO: 880 - DNA, 15 bp, Artificial Sequence
  Antisense nucleotide
gttgatcacttgctg

SEQ ID NO: 881 - DNA, 15 bp, Artificial Sequence
  Antisense nucleotide
ggattccattactcg

SEQ ID NO: 882 - DNA, 20 bp, Artificial Sequence
  Antisense nucleotide
gacatatgaaaaatgttgtc

SEQ ID NO: 883 - DNA, 17 bp, Artificial Sequence
  Antisense nucleotide
gccaataaagacatatg

SEQ ID NO: 884 - DNA, 17 bp, Artificial Sequence
  Antisense nucleotide
ccagaatcaagattctg

SEQ ID NO: 885 - DNA, 16 bp, Artificial Sequence
  Antisense nucleotide
ctgttccagaatcaag

SEQ ID NO: 886 - DNA, 20 bp, Artificial Sequence
  Antisense nucleotide
gacaaatctgttccagaatc

SEQ ID NO: 887 - DNA, 19 bp, Artificial Sequence
  Antisense nucleotide
ggaaagacaaatctgttcc

SEQ ID NO: 888 - DNA, 16 bp, Artificial Sequence
  Antisense nucleotide
gattaagaggacaagc

SEQ ID NO: 889 - DNA, 14 bp, Artificial Sequence
  Antisense nucleotide
ggaagattaagagg

SEQ ID NO: 890 - DNA, 18 bp, Artificial Sequence
  Antisense nucleotide
gcagtgtgattattctgg

SEQ ID NO: 891 - DNA, 19 bp, Artificial Sequence
  Antisense nucleotide
ggagaaagatacatatctg

SEQ ID NO: 892 - DNA, 14 bp, Artificial Sequence
  Antisense nucleotide
ggagatcttacagg

SEQ ID NO: 893 - DNA, 20 bp, Artificial
  Antisense nucleotide
gcatttgcagtagaatttac

SEQ ID NO: 894 - DNA, 14 bp, Artificial Sequence
  Antisense nucleotide
cagtgaaagagagg

SEQ ID NO: 895 - DNA, 14 bp, Artificial Sequence
  Antisense nucleotide
gctagccgatacac

SEQ ID NO: 896 - DNA, 17 bp, Artificial Sequence
  Antisense nucleotide
ggaagatccttgtatgc

SEQ ID NO: 897 - DNA, 15 bp, Artificial Sequence
  Antisense nucleotide
gcatgaggaagatcc

SEQ ID NO: 898 - DNA, 16 bp, Artificial Sequence
  Antisense nucleotide
ggagtcatttttgttg

SEQ ID NO: 899 - DNA, 19 bp, Artificial Sequence
  Antisense nucleotide
ccaattgatactaagattc

SEQ ID NO: 900 - DNA, 15 bp, Artificial Sequence
  Antisense nucleotide
tcttttgagcacacg

SEQ ID NO: 901 - DNA, 18 bp, Artificial Sequence
  Antisense nucleotide
ccttcagcacttcttttg

SEQ ID NO: 902 - DNA, 16 bp, Artificial Sequence
  Antisense nucleotide
ggttgcttccttcagc

SEQ ID NO: 903 - DNA, 14 bp, Artificial Sequence
  Antisense nucleotide
cagtggtttaggag

SEQ ID NO: 904 - DNA, 17 bp, Artificial Sequence
  Antisense nucleotide
cctgagatcctcatttc

SEQ ID NO: 905 - DNA, 17 bp, Artificial Sequence
  Antisense nucleotide
ccaaggtcctgagatcc

SEQ ID NO: 906 - DNA, 16 bp, Artificial
  Antisense nucleotide
ggtgtacacagtgtcc

SEQ ID NO: 907 - DNA, 14 bp, Artificial Sequence
  Antisense nucleotide
tatctttaatttct

SEQ ID NO: 908 - DNA, 14 bp, Artificial Sequence
  Antisense nucleotide
tcttttgaatataa

SEQ ID NO: 909 - DNA, 15 bp, Artificial Sequence
  Antisense nucleotide
ttcttttgaatataa

SEQ ID NO: 910 - DNA, 16 bp, Artificial Sequence
  Antisense nucleotide
tttcttttgaatataa

SEQ ID NO: 911 - DNA, 17 bp, Artificial Sequence
  Antisense nucleotide
ttttcttttgaatataa

SEQ ID NO: 912 - DNA, 18 bp, Artificial Sequence
  Antisense nucleotide
tttttcttttgaatataa

SEQ ID NO: 913 - DNA, 14 bp, Artificial Sequence
  Antisense nucleotide
atttctatgttttt

SEQ ID NO: 914 - DNA, 14 bp, Artificial Sequence
  Antisense nucleotide
ttaaagaatttatg

SEQ ID NO: 915 - DNA, 14 bp, Artificial Sequence
  Antisense nucleotide
gttaaagaatttat

SEQ ID NO: 916 - DNA, 15 bp, Artificial Sequence
  Antisense nucleotide
agttaaagaatttat

SEQ ID NO: 917 - DNA, 16 bp, Artificial Sequence
  Antisense nucleotide
aagttaaagaatttat

SEQ ID NO: 918 - DNA, 17 bp, Artificial Sequence
  Antisense nucleotide
taagttaaagaatttat

SEQ ID NO: 919 - DNA, 14 bp, Artificial Sequence
  Antisense nucleotide
tttagtaagttaaa

SEQ ID NO: 920 - DNA, 15 bp, Artificial Sequence
  Antisense nucleotide
ttttagtaagttaaa

SEQ ID NO: 921 - DNA, 14 bp, Artificial Sequence
  Antisense nucleotide
atttcttttagtaa

SEQ ID NO: 922 - DNA, 15 bp, Artificial Sequence
  Antisense nucleotide
aatttcttttagtaa

SEQ ID NO: 923 - DNA, 14 bp, Artificial Sequence
  Antisense nucleotide
atcaatttctttta

SEQ ID NO: 924 - DNA, 15 bp, Artificial Sequence
  Antisense nucleotide
tatcaatttctttta

SEQ ID NO: 925 - DNA, 14 bp, Artificial Sequence
  Antisense nucleotide
aatatataagttca

SEQ ID NO: 926 - DNA, 15 bp, Artificial Sequence
  Antisense nucleotide
aaatatataagttca

SEQ ID NO: 927 - DNA, 14 bp, Artificial Sequence
  Antisense nucleotide
caaatatataagtt

SEQ ID NO: 928 - DNA, 15 bp, Artificial Sequence
  Antisense nucleotide
tcaaatatataagtt

SEQ ID NO: 929 - DNA, 14 bp, Artificial Sequence
  Antisense nucleotide
tgtcaaatatataa

SEQ ID NO: 930 - DNA, 14 bp, Artificial Sequence
  Antisense nucleotide
aatttatttcagta

SEQ ID NO: 931 - DNA, 14 bp, Artificial Sequence
  Antisense nucleotide
aataaaaatgtgat

SEQ ID NO: 932 - DNA, 15 bp, Artificial Sequence
  Antisense nucleotide
taataaaaatgtgat

SEQ ID NO: 933 - DNA, 14 bp, Artificial Sequence
  Antisense nucleotide
tagctaataaaaat

SEQ ID NO: 934 - DNA, 15 bp, Artificial Sequence
  Antisense nucleotide
ttagctaataaaaat

SEQ ID NO: 935 - DNA, 16 bp, Artificial Sequence
  Antisense nucleotide
tttagctaataaaaat

SEQ ID NO: 936 - DNA, 14 bp, Artificial Sequence
  Antisense nucleotide
aataaaatagtcaa

SEQ ID NO: 937 - DNA, 15 bp, Artificial Sequence
  Antisense nucleotide
taataaaatagtcaa

SEQ ID NO: 938 - DNA, 16 bp, Artificial Sequence
  Antisense nucleotide
ttaataaaatagtcaa

SEQ ID NO: 939 - DNA, 17 bp, Artificial Sequence
  Antisense nucleotide
tttaataaaatagtcaa

SEQ ID NO: 940 - DNA, 15 bp, Artificial Sequence
  Antisense nucleotide
gtttaataaaatagt

SEQ ID NO: 941 - DNA, 16 bp, Artificial Sequence
  Antisense nucleotide
agtttaataaaatagt

SEQ ID NO: 942 - DNA, 15 bp, Artificial Sequence
  Antisense nucleotide
gagtttaataaaata

SEQ ID NO: 943 - DNA, 16 bp, Artificial Sequence
  Antisense nucleotide
agagtttaataaaata

SEQ ID NO: 944 - DNA, 14 bp, Artificial Sequence
  Antisense nucleotide
aataattcttgtat

SEQ ID NO: 945 - DNA, 14 bp, Artificial Sequence
  Antisense nucleotide
tatattacattcat

SEQ ID NO: 946 - DNA, 14 bp, Artificial Sequence
  Antisense nucleotide
atctatattacatt

SEQ ID NO: 947 - DNA, 14 bp, Artificial Sequence
  Antisense nucleotide
ataaacatttttca

SEQ ID NO: 948 - DNA, 15 bp, Artificial Sequence
  Antisense nucleotide
aataaacatttttca

SEQ ID NO: 949 - DNA, 16 bp, Artificial Sequence
  Antisense nucleotide
aaataaacatttttca

SEQ ID NO: 950 - DNA, 15 bp, Artificial Sequence
  Antisense nucleotide
gaaataaacattttt

SEQ ID NO: 951 - DNA, 16 bp, Artificial Sequence
  Antisense nucleotide
tgaaataaacattttt

SEQ ID NO: 952 - DNA, 17 bp, Artificial Sequence
  Antisense nucleotide
ttgaaataaacattttt

SEQ ID NO: 953 - DNA, 18 bp, Artificial Sequence
  Antisense nucleotide
tttgaaataaacattttt

SEQ ID NO: 954 - DNA, 19 bp, Artificial Sequence
  Antisense nucleotide
ttttgaaataaacattttt

SEQ ID NO: 955 - DNA, 20 bp, Artificial Sequence
  Antisense nucleotide
tttttgaaataaacattttt

SEQ ID NO: 956 - DNA, 20 bp, Artificial Sequence
  Antisense nucleotide
atttttgaaataaacatttt

SEQ ID NO: 957 - DNA, 19 bp, Artificial Sequence
  Antisense nucleotide
aatttttgaaataaacatt

SEQ ID NO: 958 - DNA, 20 bp, Artificial Sequence
  Antisense nucleotide
aaatttttgaaataaacatt

SEQ ID NO: 959 - DNA, 20 bp, Artificial Sequence
  Antisense nucleotide
aaaatttttgaaataaacat

SEQ ID NO: 960 - DNA, 20 bp, Artificial Sequence
  Antisense nucleotide
taaaatttttgaaataaaca

SEQ ID NO: 961 - DNA, 20 bp, Artificial Sequence
  Antisense nucleotide
ataaaatttttgaaataaac

SEQ ID NO: 962 - DNA, 20 bp, Artificial Sequence
  Antisense nucleotide
tataaaatttttgaaataaa

SEQ ID NO: 963 - DNA, 18 bp, Artificial Sequence
  Antisense nucleotide
gtataaaatttttgaaat

SEQ ID NO: 964 - DNA, 14 bp, Artificial Sequence
  Antisense nucleotide
ggtataaaattttt

SEQ ID NO: 965 - DNA, 15 bp, Artificial Sequence
  Antisense nucleotide
aggtataaaattttt

SEQ ID NO: 966 - DNA, 16 bp, Artificial Sequence
  Antisense nucleotide
aaggtataaaattttt

SEQ ID NO: 967 - DNA, 17 bp, Artificial Sequence
  Antisense nucleotide
aaaggtataaaattttt

SEQ ID NO: 968 - DNA, 18 bp, Artificial Sequence
  Antisense nucleotide
aaaaggtataaaattttt

SEQ ID NO: 969 - DNA, 19 bp, Artificial Sequence
  Antisense nucleotide
taaaaggtataaaattttt

SEQ ID NO: 970 - DNA, 20 bp, Artificial Sequence
  Antisense nucleotide
ataaaaggtataaaattttt

SEQ ID NO: 971 - DNA, 14 bp, Artificial Sequence
  Antisense nucleotide
tttagaaagatttt

SEQ ID NO: 972 - DNA, 14 bp, Artificial
  Antisense nucleotide
aagataaatttctt

SEQ ID NO: 973 - DNA, 15 bp, Artificial Sequence
  Antisense nucleotide
taagataaatttctt

SEQ ID NO: 974 - DNA, 16 bp, Artificial Sequence
  Antisense nucleotide
ttaagataaatttctt

SEQ ID NO: 975 - DNA, 17 bp, Artificial Sequence
  Antisense nucleotide
tttaagataaatttctt

SEQ ID NO: 976 - DNA, 18 bp, Artificial Sequence
  Antisense nucleotide
ttttaagataaatttctt

SEQ ID NO: 977 - DNA, 19 bp, Artificial Sequence
  Antisense nucleotide
tttttaagataaatttctt

SEQ ID NO: 978 - DNA, 20 bp, Artificial
  Antisense nucleotide
atttttaagataaatttctt

SEQ ID NO: 979 - DNA, 20 bp, Artificial Sequence
  Antisense nucleotide
tatttttaagataaatttct

SEQ ID NO: 980 - DNA, 18 bp, Artificial Sequence
  Antisense nucleotide
ttatttttaagataaatt

SEQ ID NO: 981 - DNA, 19 bp, Artificial Sequence
  Antisense nucleotide
tttatttttaagataaatt

SEQ ID NO: 982 - DNA, 19 bp, Artificial Sequence
  Antisense nucleotide
ctttatttttaagataaat

SEQ ID NO: 983 - DNA, 20 bp, Artificial Sequence
  Antisense nucleotide
tctttatttttaagataaat

SEQ ID NO: 984 - DNA, 20 bp, Artificial Sequence
  Antisense nucleotide
atctttatttttaagataaa

SEQ ID NO: 985 - DNA, 14 bp, Artificial Sequence
  Antisense nucleotide
atctttatttttaa

SEQ ID NO: 986 - DNA, 15 bp, Artificial Sequence
  Antisense nucleotide
gatctttatttttaa

SEQ ID NO: 987 - DNA, 16 bp, Artificial Sequence
  Antisense nucleotide
agatctttatttttaa

SEQ ID NO: 988 - DNA, 17 bp, Artificial Sequence
  Antisense nucleotide
tagatctttatttttaa

SEQ ID NO: 989 - DNA, 14 bp, Artificial Sequence
  Antisense nucleotide
aatcatcattaatt

SEQ ID NO: 990 - DNA, 15 bp, Artificial Sequence
  Antisense nucleotide
aaatcatcattaatt

SEQ ID NO: 991 - DNA, 16 bp, Artificial Sequence
  Antisense nucleotide
aaaatcatcattaatt

SEQ ID NO: 992 - DNA, 17 bp, Artificial Sequence
  Antisense nucleotide
taaaatcatcattaatt

SEQ ID NO: 993 - DNA, 18 bp, Artificial Sequence
  Antisense nucleotide
ttaaaatcatcattaatt

SEQ ID NO: 994 - DNA, 19 bp, Artificial Sequence
  Antisense nucleotide
tttaaaatcatcattaatt

SEQ ID NO: 995 - DNA, 20 bp, Artificial Sequence
  Antisense nucleotide
atttaaaatcatcattaatt

SEQ ID NO: 996 - DNA, 19 bp, Artificial Sequence
  Antisense nucleotide
aatttaaaatcatcattaa

SEQ ID NO: 997 - DNA, 14 bp, Artificial Sequence
  Antisense nucleotide
gaatttaaaatcat

SEQ ID NO: 998 - DNA, 15 bp, Artificial Sequence
  Antisense nucleotide
tgaatttaaaatcat

SEQ ID NO: 999 - DNA, 14 bp, Artificial Sequence
  Antisense nucleotide
ttaaaataggaaat

SEQ ID NO: 1000 - DNA, 14 bp, Artificial Sequence
  Antisense nucleotide
aatttctctttaaa

SEQ ID NO: 1001 - DNA, 15 bp, Artificial Sequence
  Antisense nucleotide
aaatttctctttaaa

SEQ ID NO: 1002 - DNA, 14 bp, Artificial Sequence
  Antisense nucleotide
taaaattttgaatg

SEQ ID NO: 1003 - DNA, 14 bp, Artificial Sequence
  Antisense nucleotide
ctaaaattttgaat

SEQ ID NO: 1004 - DNA, 14 bp, Artificial Sequence
  Antisense nucleotide
tttgctaaaatttt

SEQ ID NO: 1005 - DNA, 14 bp, Artificial Sequence
  Antisense nucleotide
atatgaaaaatgtt

SEQ ID NO: 1006 - DNA, 14 bp, Artificial Sequence
  Antisense nucleotide
ttttaaattaagca

SEQ ID NO: 1007 - DNA, 14 bp, Artificial Sequence
  Antisense nucleotide
ttgtaaaaatcaaa

SEQ ID NO: 1008 - DNA, 15 bp, Artificial Sequence
  Antisense nucleotide
tttgtaaaaatcaaa

SEQ ID NO: 1009 - DNA, 14 bp, Artificial Sequence
  Antisense nucleotide
tttgataaaacttt

SEQ ID NO: 1010 - DNA, 14 bp, Artificial Sequence
  Antisense nucleotide
atgttttatcattt

SEQ ID NO: 1011 - DNA, 15 bp, Artificial Sequence
  Antisense nucleotide
aatgttttatcattt

SEQ ID NO: 1012 - DNA, 16 bp, Artificial Sequence
  Antisense nucleotide
aaatgttttatcattt

SEQ ID NO: 1013 - DNA, 17 bp, Artificial Sequence
  Antisense nucleotide
taaatgttttatcattt

SEQ ID NO: 1014 - DNA, 14 bp, Artificial Sequence
  Antisense nucleotide
tctaaatgttttat

SEQ ID NO: 1015 - DNA, 15 bp, Artificial Sequence
  Antisense nucleotide
ttctaaatgttttat

SEQ ID NO: 1016 - DNA, 14 bp, Artificial Sequence
  Antisense nucleotide
taagatcaaataaa

SEQ ID NO: 1017 - DNA, 15 bp, Artificial Sequence
  Antisense nucleotide
ataagatcaaataaa

SEQ ID NO: 1018 - DNA, 16 bp, Artificial Sequence
  Antisense nucleotide
aataagatcaaataaa

SEQ ID NO: 1019 - DNA, 17 bp, Artificial Sequence
  Antisense nucleotide
taataagatcaaataaa

SEQ ID NO: 1020 - DNA, 18 bp, Artificial Sequence
  Antisense nucleotide
ttaataagatcaaataaa

SEQ ID NO: 1021 - DNA, 19 bp, Artificial Sequence
  Antisense nucleotide
tttaataagatcaaataaa

SEQ ID NO: 1022 - DNA, 14 bp, Artificial Sequence
  Antisense nucleotide
ttgtttaataagat

SEQ ID NO: 1023 - DNA, 15 bp, Artificial Sequence
  Antisense nucleotide
attgtttaataagat

SEQ ID NO: 1024 - DNA, 14 bp, Artificial Sequence
  Antisense nucleotide
tgattgtttaataa

SEQ ID NO: 1025 - DNA, 15 bp, Artificial Sequence
  Antisense nucleotide
ttgattgtttaataa

SEQ ID NO: 1026 - DNA, 16 bp, Artificial Sequence
  Antisense nucleotide
tttgattgtttaataa

SEQ ID NO: 1027 - DNA, 14 bp, Artificial Sequence
  Antisense nucleotide
ttttataaaacagt

SEQ ID NO: 1028 - DNA, 15 bp, Artificial Sequence
  Antisense nucleotide
tttttataaaacagt

SEQ ID NO: 1029 - DNA, 16 bp, Artificial Sequence
  Antisense nucleotide
ttttttataaaacagt

SEQ ID NO: 1030 - DNA, 15 bp, Artificial Sequence
  Antisense nucleotide
cttttttataaaaca

SEQ ID NO: 1031 - DNA, 16 bp, Artificial Sequence
  Antisense nucleotide
acttttttataaaaca

SEQ ID NO: 1032 - DNA, 15 bp, Artificial Sequence
  Antisense nucleotide
cacttttttataaaa

SEQ ID NO: 1033 - DNA, 16 bp, Artificial Sequence
  Antisense nucleotide
acacttttttataaaa

SEQ ID NO: 1034 - DNA, 17 bp, Artificial Sequence
  Antisense nucleotide
tacacttttttataaaa

SEQ ID NO: 1035 - DNA, 18 bp, Artificial Sequence
  Antisense nucleotide
atacacttttttataaaa

SEQ ID NO: 1036 - DNA, 14 bp, Artificial Sequence
  Antisense nucleotide
attttgaatttaag

SEQ ID NO: 1037 - DNA, 14 bp, Artificial Sequence
  Antisense nucleotide
gattttgaatttaa

SEQ ID NO: 1038 - DNA, 15 bp, Artificial Sequence
  Antisense nucleotide
tgattttgaatttaa

SEQ ID NO: 1039 - DNA, 16 bp, Artificial Sequence
  Antisense nucleotide
atgattttgaatttaa

SEQ ID NO: 1040 - DNA, 17 bp, Artificial Sequence
  Antisense nucleotide
aatgattttgaatttaa

SEQ ID NO: 1041 - DNA, 14 bp, Artificial Sequence
  Antisense nucleotide
ataatagaatcata

SEQ ID NO: 1042 - DNA, 15 bp, Artificial Sequence
  Antisense nucleotide
tataatagaatcata

SEQ ID NO: 1043 - DNA, 14 bp, Artificial Sequence
  Antisense nucleotide
tataatagaatcat

SEQ ID NO: 1044 - DNA, 14 bp, Artificial Sequence
  Antisense nucleotide
tactataatagaat

SEQ ID NO: 1045 - DNA, 15 bp, Artificial Sequence
  Antisense nucleotide
atactataatagaat

SEQ ID NO: 1046 - DNA, 16 bp, Artificial Sequence
  Antisense nucleotide
aatactataatagaat

SEQ ID NO: 1047 - DNA, 14 bp, Artificial Sequence
  Antisense nucleotide
agaatactataata

SEQ ID NO: 1048 - DNA, 15 bp, Artificial Sequence
  Antisense nucleotide
tagaatactataata

SEQ ID NO: 1049 - DNA, 16 bp, Artificial Sequence
  Antisense nucleotide
atagaatactataata

SEQ ID NO: 1050 - DNA, 17 bp, Artificial Sequence
  Antisense nucleotide
tatagaatactataata

SEQ ID NO: 1051 - DNA, 18 bp, Artificial Sequence
  Antisense nucleotide
ttatagaatactataata

SEQ ID NO: 1052 - DNA, 14 bp, Artificial Sequence
  Antisense nucleotide
aatatttgttttca

SEQ ID NO: 1053 - DNA, 15 bp, Artificial Sequence
  Antisense nucleotide
aaatatttgttttca

SEQ ID NO: 1054 - DNA, 16 bp, Artificial Sequence
  Antisense nucleotide
aaaatatttgttttca

SEQ ID NO: 1055 - DNA, 15 bp, Artificial Sequence
  Antisense nucleotide
caaaatatttgtttt

SEQ ID NO: 1056 - DNA, 14 bp, Artificial Sequence
  Antisense nucleotide
aaattttatatgga

SEQ ID NO: 1057 - DNA, 14 bp, Artificial Sequence
  Antisense nucleotide
tgaaattttatatg

SEQ ID NO: 1058 - DNA, 14 bp, Artificial Sequence
  Antisense nucleotide
ctgaaattttatat

SEQ ID NO: 1059 - DNA, 15 bp, Artificial Sequence
  Antisense nucleotide
tctgaaattttatat

SEQ ID NO: 1060 - DNA, 16 bp, Artificial Sequence
  Antisense nucleotide
ttctgaaattttatat

SEQ ID NO: 1061 - DNA, 14 bp, Artificial Sequence
  Antisense nucleotide
atctgatttatttt

SEQ ID NO: 1062 - DNA, 14 bp, Artificial Sequence
  Antisense nucleotide
aagatattaaatgt

SEQ ID NO: 1063 - DNA, 14 bp, Artificial Sequence
  Antisense nucleotide
tgaagatattaaat

SEQ ID NO: 1064 - DNA, 14 bp, Artificial Sequence
  Antisense nucleotide
ataaataacaatga

SEQ ID NO: 1065 - DNA, 15 bp, Artificial Sequence
  Antisense nucleotide
tataaataacaatga

SEQ ID NO: 1066 - DNA, 14 bp, Artificial Sequence
  Antisense nucleotide
gtataaataacaat

SEQ ID NO: 1067 - DNA, 15 bp, Artificial Sequence
  Antisense nucleotide
tgtataaataacaat

SEQ ID NO: 1068 - DNA, 16 bp, Artificial Sequence
  Antisense nucleotide
ttgtataaataacaat

SEQ ID NO: 1069 - DNA, 14 bp, Artificial Sequence
  Antisense nucleotide
tcttgtataaataa

SEQ ID NO: 1070 - DNA, 15 bp, Artificial Sequence
  Antisense nucleotide
atcttgtataaataa

SEQ ID NO: 1071 - DNA, 16 bp, Artificial Sequence
  Antisense nucleotide
aatcttgtataaataa

SEQ ID NO: 1072 - DNA, 14 bp, Artificial Sequence
  Antisense nucleotide
acaactttttaaat

SEQ ID NO: 1073 - DNA, 15 bp, Artificial Sequence
  Antisense nucleotide
tacaactttttaaat

SEQ ID NO: 1074 - DNA, 14 bp, Artificial Sequence
  Antisense nucleotide
tacaactttttaaa

SEQ ID NO: 1075 - DNA, 21 bp, Artificial Sequence
  Antisense nucleotide
cggggggttttgggcggcatg

SEQ ID NO: 1076 - DNA, 23 bp, Artificial Sequence
  Antisense nucleotide
ttttcggggggttttgggcggca

SEQ ID NO: 1077 - DNA, 19 bp, Artificial Sequence
  Antisense nucleotide
tcggggggttttgggcggc

SEQ ID NO: 1078 - DNA, 24 bp, Artificial Sequence
  Antisense nucleotide
ggtggcggccgtttttcggggggt

SEQ ID NO: 1079 - DNA, 23 bp, Artificial Sequence
  Antisense nucleotide
ccgggggttccgcggcggcagcg

SEQ ID NO: 1080 - DNA, 17 bp, Artificial Sequence
  Antisense nucleotide
cgggggttccgcggcgg

SEQ ID NO: 1081 - DNA, 23 bp, Artificial Sequence
  Antisense nucleotide
ggcggcggtgccgggggttccgc

SEQ ID NO: 1082 - DNA, 22 bp, Artificial Sequence
  Antisense nucleotide
ggagggggcggcggcggcggtg

SEQ ID NO: 1083 - DNA, 17 bp, Artificial Sequence
  Antisense nucleotide
gggggcggcggcggcgg

SEQ ID NO: 1084 - DNA, 15 bp, Artificial Sequence
  Antisense nucleotide
ggggcggcggcggcg

SEQ ID NO: 1085 - DNA, 17 bp, Artificial Sequence
  Antisense nucleotide
agggggcctggtggaag

SEQ ID NO: 1086 - DNA, 14 bp, Artificial
  Antisense nucleotide
tagggggcctggtg

SEQ ID NO: 1087 - DNA, 14 bp, Artificial Sequence
  Antisense nucleotide
gtagggggcctggt

SEQ ID NO: 1088 - DNA, 26 bp, Artificial Sequence
  Antisense nucleotide
gaggtattggtgacaaggtagggggc

SEQ ID NO: 1089 - DNA, 26 bp, Artificial Sequence
  Antisense nucleotide
tcttcaggggtgaaatatagatgttc

SEQ ID NO: 1090 - DNA, 16 bp, Artificial Sequence
  Antisense nucleotide
ggactcttcaggggtg

SEQ ID NO: 1091 - DNA, 14 bp, Artificial Sequence
  Antisense nucleotide
tcggactatactgc

SEQ ID NO: 1092 - DNA, 16 bp, Artificial Sequence
  Antisense nucleotide
cagttcggactatact

SEQ ID NO: 1093 - DNA, 14 bp, Artificial Sequence
  Antisense nucleotide
aagcctaagacgca

SEQ ID NO: 1094 - DNA, 14 bp, Artificial Sequence
  Antisense nucleotide
gcccaagttcaaca

SEQ ID NO: 1095 - DNA, 14 bp, Artificial Sequence
  Antisense nucleotide
tgaaaagtcgcggt

SEQ ID NO: 1096 - DNA, 18 bp, Artificial Sequence
  Antisense nucleotide
ggttaattaagatgcctc

SEQ ID NO: 1097 - DNA, 14 bp, Artificial Sequence
  Antisense nucleotide
tctctaagagcgca

SEQ ID NO: 1098 - DNA, 16 bp, Artificial Sequence
  Antisense nucleotide
acgtgaggttagtttg

SEQ ID NO: 1099 - DNA, 14 bp, Artificial Sequence
  Antisense nucleotide
cacgtgaggttagt

SEQ ID NO: 1100 - DNA, 14 bp, Artificial Sequence
  Antisense nucleotide
catagaacagtccg

SEQ ID NO: 1101 - DNA, 16 bp, Artificial Sequence
  Antisense nucleotide
cagtcatagaacagtc

SEQ ID NO: 1102 - DNA, 18 bp, Artificial Sequence
  Antisense nucleotide
ctttgcagtcatagaaca

SEQ ID NO: 1103 - DNA, 14 bp, Artificial Sequence
  Antisense nucleotide
tgcagtcatagaac

SEQ ID NO: 1104 - DNA, 14 bp, Artificial Sequence
  Antisense nucleotide
ggtcgtttccatct

SEQ ID NO: 1105 - DNA, 16 bp, Artificial Sequence
  Antisense nucleotide
catagaaggtcgtttc

SEQ ID NO: 1106 - DNA, 14 bp, Artificial Sequence
  Antisense nucleotide
cgtcatagaaggtc

SEQ ID NO: 1107 - DNA, 15 bp, Artificial Sequence
  Antisense nucleotide
catcgtcatagaagg

SEQ ID NO: 1108 - DNA, 24 bp, Artificial Sequence
  Antisense nucleotide
ggacgggaggaacgaggcgttgag

SEQ ID NO: 1109 - DNA, 14 bp, Artificial Sequence
  Antisense nucleotide
tagccataaggtcc

SEQ ID NO: 1110 - DNA, 14 bp, Artificial Sequence
  Antisense nucleotide
ggttactgtagcca

SEQ ID NO: 1111 - DNA, 14 bp, Artificial Sequence
  Antisense nucleotide
ggttactgtagcca

SEQ ID NO: 1112 - DNA, 18 bp, Artificial Sequence
  Antisense nucleotide
agttcttggcgcggaggt

SEQ ID NO: 1113 - DNA, 18 bp, Artificial Sequence
  Antisense nucleotide
aggtgaggaggtccgagt

SEQ ID NO: 1114 - DNA, 16 bp, Artificial Sequence
  Antisense nucleotide
tggactggattatcag

SEQ ID NO: 1115 - DNA, 18 bp, Artificial Sequence
  Antisense nucleotide
gtggtggtgatgtgcccg

SEQ ID NO: 1116 - DNA, 14 bp, Artificial Sequence
  Antisense nucleotide
tgtcacgttcttgg

SEQ ID NO: 1117 - DNA, 14 bp, Artificial Sequence
  Antisense nucleotide
ctcatctgtcacgt

SEQ ID NO: 1118 - DNA, 18 bp, Artificial Sequence
  Antisense nucleotide
cgaagccctcggcgaacc

SEQ ID NO: 1119 - DNA, 24 bp, Artificial Sequence
  Antisense nucleotide
gcgtgttctggctgtgcagttcgg

SEQ ID NO: 1120 - DNA, 14 bp, Artificial Sequence
  Antisense nucleotide
ctgccccgttgacc

SEQ ID NO: 1121 - DNA, 14 bp, Artificial Sequence
  Antisense nucleotide
aggtttgcgtagac

SEQ ID NO: 1122 - DNA, 14 bp, Artificial Sequence
  Antisense nucleotide
ggttgaagttgctg

SEQ ID NO: 1123 - DNA, 14 bp, Artificial Sequence
  Antisense nucleotide
ctgggttgaagttg

SEQ ID NO: 1124 - DNA, 20 bp, Artificial Sequence
  Antisense nucleotide
tgctgcacgggcatctgctg

SEQ ID NO: 1125 - DNA, 27 bp, Artificial Sequence
  Antisense nucleotide
ggcactgtctgaggctcctccttcagg

SEQ ID NO: 1126 - DNA, 14 bp, Artificial Sequence
  Antisense nucleotide
actccatgtcgatg

SEQ ID NO: 1127 - DNA, 16 bp, Artificial Sequence
  Antisense nucleotide
ctctccgccttgatcc

SEQ ID NO: 1128 - DNA, 16 bp, Artificial Sequence
  Antisense nucleotide
gttcctcatgcgcttc

SEQ ID NO: 1129 - DNA, 14 bp, Artificial Sequence
  Antisense nucleotide
ctgagctttcaagg

SEQ ID NO: 1130 - DNA, 26 bp, Artificial Sequence
  Antisense nucleotide
gcgattctctccagcttcctttttcg

SEQ ID NO: 1131 - DNA, 30 bp, Artificial Sequence
  Antisense nucleotide
ctgagctttcaaggttttcactttttcctc

SEQ ID NO: 1132 - DNA, 14 bp, Artificial Sequence
  Antisense nucleotide
tccctgagcatgtt

SEQ ID NO: 1133 - DNA, 16 bp, Artificial Sequence
  Antisense nucleotide
tctgtttaagctgtgc

SEQ ID NO: 1134 - DNA, 18 bp, Artificial Sequence
  Antisense nucleotide
ctttctgtttaagctgtg

SEQ ID NO: 1135 - DNA, 16 bp, Artificial Sequence
  Antisense nucleotide
ggttcatgactttctg

SEQ ID NO: 1136 - DNA, 14 bp, Artificial Sequence
  Antisense nucleotide
cgtggttcatgact

SEQ ID NO: 1137 - DNA, 16 bp, Artificial Sequence
  Antisense nucleotide
actgttaacgtggttc

SEQ ID NO: 1138 - DNA, 14 bp, Artificial Sequence
  Antisense nucleotide
ccactgttaacgtg

SEQ ID NO: 1139 - DNA, 14 bp, Artificial Sequence
  Antisense nucleotide
cccactgttaacgt

SEQ ID NO: 1140 - DNA, 14 bp, Artificial Sequence
  Antisense nucleotide
agcatgagttggca

SEQ ID NO: 1141 - DNA, 14 bp, Artificial Sequence
  Antisense nucleotide
gcgttagcatgagt

SEQ ID NO: 1142 - DNA, 14 bp, Artificial Sequence
  Antisense nucleotide
gtttgcaactgctg

SEQ ID NO: 1143 - DNA, 18 bp, Artificial Sequence
  Antisense nucleotide
caaaatgtttgcaactgc

SEQ ID NO: 1144 - DNA, 18 bp, Artificial Sequence
  Antisense nucleotide
tccattttagtgcacatc

SEQ ID NO: 1145 - DNA, 18 bp, Artificial Sequence
  Antisense nucleotide
ctgttccattttagtgca

SEQ ID NO: 1146 - DNA, 14 bp, Artificial Sequence
  Antisense nucleotide
gtgtatgagtcgtc

SEQ ID NO: 1147 - DNA, 14 bp, Artificial Sequence
  Antisense nucleotide
ctgtgtatgagtcg

SEQ ID NO: 1148 - DNA, 14 bp, Artificial Sequence
  Antisense nucleotide
cgtagctgtgtatg

SEQ ID NO: 1149 - DNA, 14 bp, Artificial Sequence
  Antisense nucleotide
tcgtgtagagagag

SEQ ID NO: 1150 - DNA, 18 bp, Artificial Sequence
  Antisense nucleotide
agtttgtagtcgtgtaga

SEQ ID NO: 1151 - DNA, 16 bp, Artificial Sequence
  Antisense nucleotide
gtttgtagtcgtgtag

SEQ ID NO: 1152 - DNA, 14 bp, Artificial Sequence
  Antisense nucleotide
agtttgtagtcgtg

SEQ ID NO: 1153 - DNA, 14 bp, Artificial Sequence
  Antisense nucleotide
ggagtttgtagtcg

SEQ ID NO: 1154 - DNA, 16 bp, Artificial Sequence
  Antisense nucleotide
tcaggagtttgtagtc

SEQ ID NO: 1155 - DNA, 18 bp, Artificial Sequence
  Antisense nucleotide
gtttcaggagtttgtagt

SEQ ID NO: 1156 - DNA, 14 bp, Artificial Sequence
  Antisense nucleotide
tcggtttcaggagt

SEQ ID NO: 1157 - DNA, 14 bp, Artificial Sequence
  Antisense nucleotide
ttgagactccggta

SEQ ID NO: 1158 - DNA, 16 bp, Artificial Sequence
  Antisense nucleotide
accagaaaagtagctg

SEQ ID NO: 1159 - DNA, 14 bp, Artificial Sequence
  Antisense nucleotide
cctgaccagaaaag

SEQ ID NO: 1160 - DNA, 14 bp, Artificial Sequence
  Antisense nucleotide
attcaggcgttcca

SEQ ID NO: 1161 - DNA, 16 bp, Artificial Sequence
  Antisense nucleotide
ggtaaaagtactgtcc

SEQ ID NO: 1162 - DNA, 16 bp, Artificial Sequence
  Antisense nucleotide
gggtaaaagtactgtc

SEQ ID NO: 1163 - DNA, 18 bp, Artificial Sequence
  Antisense nucleotide
gcacctccaccgctgcca

SEQ ID NO: 1164 - DNA, 18 bp, Artificial Sequence
  Antisense nucleotide
ctcctgctcctcggtgac

SEQ ID NO: 1165 - DNA, 14 bp, Artificial Sequence
  Antisense nucleotide
gctttgacaaagcc

SEQ ID NO: 1166 - DNA, 14 bp, Artificial Sequence
  Antisense nucleotide
cttgtgcagatcgt

SEQ ID NO: 1167 - DNA, 16 bp, Artificial Sequence
  Antisense nucleotide
tcatcttgtgcagatc

SEQ ID NO: 1168 - DNA, 16 bp, Artificial Sequence
  Antisense nucleotide
gttcatcttgtgcaga

SEQ ID NO: 1169 - DNA, 14 bp, Artificial Sequence
  Antisense nucleotide
cgtggttcatcttg

SEQ ID NO: 1170 - DNA, 14 bp, Artificial Sequence
  Antisense nucleotide
tcacgtggttcatc

SEQ ID NO: 1171 - DNA, 14 bp, Artificial Sequence
  Antisense nucleotide
ggttggtgtaaacg

SEQ ID NO: 1172 - DNA, 20 bp, Artificial Sequence
  Antisense nucleotide
tacgagctcccggtcccgac

SEQ ID NO: 1173 - DNA, 14 bp, Artificial Sequence
  Antisense nucleotide
tagctgatggtggt

SEQ ID NO: 1174 - DNA, 14 bp, Artificial Sequence
  Antisense nucleotide
tccttgaaggtgga

SEQ ID NO: 1175 - DNA, 16 bp, Artificial Sequence
  Antisense nucleotide
tcttccatgttgatgg

SEQ ID NO: 1176 - DNA, 14 bp, Artificial Sequence
  Antisense nucleotide
ctttgatgcgctct

SEQ ID NO: 1177 - DNA, 14 bp, Artificial Sequence
  Antisense nucleotide
ctccactttgatgc

SEQ ID NO: 1178 - DNA, 30 bp, Artificial Sequence
  Antisense nucleotide
gctccagcttccgcttccggcacttggtgg

SEQ ID NO: 1179 - DNA, 30 bp, Artificial Sequence
  Antisense nucleotide
ggccttgagcgtcttcaccttgtcctccag

SEQ ID NO: 1180 - DNA, 16 bp, Artificial Sequence
  Antisense nucleotide
tgaccttctgtttgag

SEQ ID NO: 1181 - DNA, 16 bp, Artificial Sequence
  Antisense nucleotide
catgaccttctgtttg

SEQ ID NO: 1182 - DNA, 14 bp, Artificial Sequence
  Antisense nucleotide
gtcatgaccttctg

SEQ ID NO: 1183 - DNA, 14 bp, Artificial Sequence
  Antisense nucleotide
cgagaacatcatcg

SEQ ID NO: 1184 - DNA, 14 bp, Artificial Sequence
  Antisense nucleotide
gtagtctgcgttga

SEQ ID NO: 1185 - DNA, 20 bp, Artificial Sequence
  Antisense nucleotide
gctgcagcgggaggatgacg

SEQ ID NO: 1186 - DNA, 16 bp, Artificial Sequence
  Antisense nucleotide
agtaagagaggctatc

SEQ ID NO: 1187 - DNA, 14 bp, Artificial Sequence
  Antisense nucleotide
gtagtaagagaggc

SEQ ID NO: 1188 - DNA, 14 bp, Artificial Sequence
  Antisense nucleotide
ggtagtaagagagg

SEQ ID NO: 1189 - DNA, 16 bp, Artificial Sequence
  Antisense nucleotide
gtgagtggtagtaaga

SEQ ID NO: 1190 - DNA, 18 bp, Artificial Sequence
  Antisense nucleotide
gtccgtgcagaagtcctg

SEQ ID NO: 1191 - DNA, 16 bp, Artificial Sequence
  Antisense nucleotide
gaatgaagttggcact

SEQ ID NO: 1192 - DNA, 14 bp, Artificial Sequence
  Antisense nucleotide
ggaatgaagttggc

SEQ ID NO: 1193 - DNA, 14 bp, Artificial Sequence
  Antisense nucleotide
gggaatgaagttgg

SEQ ID NO: 1194 - DNA, 30 bp, Artificial Sequence
  Antisense nucleotide
gctgcaccagccactgcaggtccggactgg

SEQ ID NO: 1195 - DNA, 16 bp, Artificial Sequence
  Antisense nucleotide
tcatggtcttcacaac

SEQ ID NO: 1196 - DNA, 30 bp, Artificial Sequence
  Antisense nucleotide
caatgctctgcgctcggcctcctgtcatgg

SEQ ID NO: 1197 - DNA, 14 bp, Artificial Sequence
  Antisense nucleotide
ctagagttcctcac

SEQ ID NO: 1198 - DNA, 14 bp, Artificial Sequence
  Antisense nucleotide
gagtacgctagagt

SEQ ID NO: 1199 - DNA, 14 bp, Artificial Sequence
  Antisense nucleotide
gaagagtacgctag

SEQ ID NO: 1200 - DNA, 28 bp, Artificial Sequence
  Antisense nucleotide
ctgcttcccacccagcccccacattccc

SEQ ID NO: 1201 - DNA, 20 bp, Artificial Sequence
  Antisense nucleotide
ttcatcctctgtactgggct

SEQ ID NO: 1202 - DNA, 14 bp, Artificial Sequence
  Antisense nucleotide
gttacggatgtgca

SEQ ID NO: 1203 - DNA, 14 bp, Artificial Sequence
  Antisense nucleotide
cagttacggatgtg

SEQ ID NO: 1204 - DNA, 14 bp, Artificial Sequence
  Antisense nucleotide
ccagttacggatgt

SEQ ID NO: 1205 - DNA, 14 bp, Artificial Sequence
  Antisense nucleotide
agagtctgagttgg

SEQ ID NO: 1206 - DNA, 14 bp, Artificial Sequence
  Antisense nucleotide
gtgagactcagagt

SEQ ID NO: 1207 - DNA, 14 bp, Artificial Sequence
  Antisense nucleotide
tcttagggtgagac

SEQ ID NO: 1208 - DNA, 16 bp, Artificial Sequence
  Antisense nucleotide
gagagtacttcttagg

SEQ ID NO: 1209 - DNA, 18 bp, Artificial Sequence
  Antisense nucleotide
ggaagaaactatgagagt

SEQ ID NO: 1210 - DNA, 18 bp, Artificial Sequence
  Antisense nucleotide
cttagggaagaaactatg

SEQ ID NO: 1211 - DNA, 16 bp, Artificial Sequence
  Antisense nucleotide
cggtaagaaacttagg

SEQ ID NO: 1212 - DNA, 14 bp, Artificial Sequence
  Antisense nucleotide
agcatgcggtaaga

SEQ ID NO: 1213 - DNA, 14 bp, Artificial Sequence
  Antisense nucleotide
gtctgaaagcatgc

SEQ ID NO: 1214 - DNA, 16 bp, Artificial Sequence
  Antisense nucleotide
agaacaaagaagagcc

SEQ ID NO: 1215 - DNA, 18 bp, Artificial Sequence
  Antisense nucleotide
caagagaacaaagaagag

SEQ ID NO: 1216 - DNA, 16 bp, Artificial Sequence
  Antisense nucleotide
cagcaagagaacaaag

SEQ ID NO: 1217 - DNA, 14 bp, Artificial Sequence
  Antisense nucleotide
tcctcagcaagaga

SEQ ID NO: 1218 - DNA, 14 bp, Artificial Sequence
  Antisense nucleotide
aggtgtgacttgca

SEQ ID NO: 1219 - DNA, 16 bp, Artificial
  Antisense nucleotide
gaataggtgtgacttg

SEQ ID NO: 1220 - DNA, 16 bp, Artificial Sequence
  Antisense nucleotide
cagaataggtgtgact

SEQ ID NO: 1221 - DNA, 14 bp, Artificial Sequence
  Antisense nucleotide
gcagaataggtgtg

SEQ ID NO: 1222 - DNA, 16 bp, Artificial Sequence
  Antisense nucleotide
cagttgcagaataggt

SEQ ID NO: 1223 - DNA, 16 bp, Artificial Sequence
  Antisense nucleotide
gaaaccatttctgacc

SEQ ID NO: 1224 - DNA, 18 bp, Artificial Sequence
  Antisense nucleotide
tgtgaaaccatttctgac

SEQ ID NO: 1225 - DNA, 18 bp, Artificial Sequence
  Antisense nucleotide
cactgtgaaaccatttct

SEQ ID NO: 1226 - DNA, 14 bp, Artificial Sequence
  Antisense nucleotide
ccactgtgaaacca

SEQ ID NO: 1227 - DNA, 30 bp, Artificial Sequence
  Antisense nucleotide
agaactggctcctgcagcttccctgcttcc

SEQ ID NO: 1228 - DNA, 15 bp, Artificial Sequence
  Antisense nucleotide
cacctccattcaccc

SEQ ID NO: 1229 - DNA, 16 bp, Artificial Sequence
  Antisense nucleotide
cagtaaaagtgtctgc

SEQ ID NO: 1230 - DNA, 18 bp, Artificial Sequence
  Antisense nucleotide
cgacattcagtaaaagtg

SEQ ID NO: 1231 - DNA, 14 bp, Artificial Sequence
  Antisense nucleotide
gaccgacattcagt

SEQ ID NO: 1232 - DNA, 18 bp, Artificial Sequence
  Antisense nucleotide
cttctggagataactaga

SEQ ID NO: 1233 - DNA, 18 bp, Artificial Sequence
  Antisense nucleotide
catcttattcctttccct

SEQ ID NO: 1234 - DNA, 16 bp, Artificial Sequence
  Antisense nucleotide
cagccatcttattcct

SEQ ID NO: 1235 - DNA, 16 bp, Artificial Sequence
  Antisense nucleotide
tgcagccatcttattc

SEQ ID NO: 1236 - DNA, 15 bp, Artificial Sequence
  Antisense nucleotide
gagtgtatcagtcag

SEQ ID NO: 1237 - DNA, 14 bp, Artificial Sequence
  Antisense nucleotide
ggagtgtatcagtc

SEQ ID NO: 1238 - DNA, 16 bp, Artificial Sequence
  Antisense nucleotide
cttggagtgtatcagt

SEQ ID NO: 1239 - DNA, 14 bp, Artificial Sequence
  Antisense nucleotide
acagagtacctacc

SEQ ID NO: 1240 - DNA, 16 bp, Artificial Sequence
  Antisense nucleotide
ccaactttcccttaag

SEQ ID NO: 1241 - DNA, 16 bp, Artificial Sequence
  Antisense nucleotide
ccttatgctcaatctc

SEQ ID NO: 1242 - DNA, 14 bp, Artificial Sequence
  Antisense nucleotide
gtcttactcaaggg

SEQ ID NO: 1243 - DNA, 16 bp, Artificial Sequence
  Antisense nucleotide
acagtcttactcaagg

SEQ ID NO: 1244 - DNA, 18 bp, Artificial Sequence
  Antisense nucleotide
cataagacacagtcttac

SEQ ID NO: 1245 - DNA, 18 bp, Artificial Sequence
  Antisense nucleotide
gaaagcataagacacagt

SEQ ID NO: 1246 - DNA, 16 bp, Artificial Sequence
  Antisense nucleotide
ggaaagcataagacac

SEQ ID NO: 1247 - DNA, 16 bp, Artificial Sequence
  Antisense nucleotide
agggataaaggaaagc

SEQ ID NO: 1248 - DNA, 14 bp, Artificial Sequence
  Antisense nucleotide
cctgtatacagagg

SEQ ID NO: 1249 - DNA, 16 bp, Artificial Sequence
  Antisense nucleotide
tgtctcctgtatacag

SEQ ID NO: 1250 - DNA, 16 bp, Artificial Sequence
  Antisense nucleotide
catcttctagttggtc

SEQ ID NO: 1251 - DNA, 16 bp, Artificial Sequence
  Antisense nucleotide
ctcatcttctagttgg

SEQ ID NO: 1252 - DNA, 18 bp, Artificial Sequence
  Antisense nucleotide
cttctcatcttctagttg

SEQ ID NO: 1253 - DNA, 16 bp, Artificial Sequence
  Antisense nucleotide
caaagcagacttctca

SEQ ID NO: 1254 - DNA, 14 bp, Artificial Sequence
  Antisense nucleotide
ctgcaaagcagact

SEQ ID NO: 1255 - DNA, 18 bp, Artificial Sequence
  Antisense nucleotide
ctagtttttccttctcct

SEQ ID NO: 1256 - DNA, 18 bp, Artificial Sequence
  Antisense nucleotide
tctagtttttccttctcc

SEQ ID NO: 1257 - DNA, 16 bp, Artificial Sequence
  Antisense nucleotide
caggatgaactctagt

SEQ ID NO: 1258 - DNA, 14 bp, Artificial Sequence
  Antisense nucleotide
tcgtagaaggtcgt

SEQ ID NO: 1259 - DNA, 14 bp, Artificial Sequence
  Antisense nucleotide
agggttactgtagc

SEQ ID NO: 1260 - DNA, 14 bp, Artificial Sequence
  Antisense nucleotide
gtagtggtgatgtg

SEQ ID NO: 1261 - DNA, 14 bp, Artificial Sequence
  Antisense nucleotide
cgtcgtagaaggtc

SEQ ID NO: 1262 - DNA, 14 bp, Artificial Sequence
  Antisense nucleotide
tttcgtgcacatcc

SEQ ID NO: 1263 - DNA, 18 bp, Artificial Sequence
  Antisense nucleotide
agtttgtagtcgtgaaga

SEQ ID NO: 1264 - DNA, 14 bp, Artificial Sequence
  Antisense nucleotide
cgagaacatcatgg

SEQ ID NO: 1265 - DNA, 14 bp, Artificial Sequence
  Antisense nucleotide
gtagtaggaaaggc

SEQ ID NO: 1266 - DNA, 14 bp, Artificial Sequence
  Antisense nucleotide
ggtagtaggaaagg

SEQ ID NO: 1267 - DNA, 14 bp, Artificial Sequence
  Antisense nucleotide
ggaatggtagtagg

SEQ ID NO: 1268 - DNA, 15 bp, Artificial Sequence
  Antisense nucleotide
ggtcattgagaagag

SEQ ID NO: 1269 - DNA, 16 bp, Artificial Sequence
  Antisense nucleotide
gctaatgttcttgacc

SEQ ID NO: 1270 - DNA, 14 bp, Artificial Sequence
  Antisense nucleotide
gccaaggtcctcat

SEQ ID NO: 1271 - DNA, 14 bp, Artificial Sequence
  Antisense nucleotide
ggagtctatctcca

SEQ ID NO: 1272 - DNA, 16 bp, Artificial Sequence
  Antisense nucleotide
ccaaagaatcctgact

SEQ ID NO: 1273 - DNA, 14 bp, Artificial Sequence
  Antisense nucleotide
cacatgcttagtgg

SEQ ID NO: 1274 - DNA, 14 bp, Artificial Sequence
  Antisense nucleotide
ctcgtaaatgaccg

SEQ ID NO: 1275 - DNA, 18 bp, Artificial Sequence
  Antisense nucleotide
aggaatctcgtaaatgac

SEQ ID NO: 1276 - DNA, 14 bp, Artificial Sequence
  Antisense nucleotide
cagcagcgattcat

SEQ ID NO: 1277 - DNA, 16 bp, Artificial Sequence
  Antisense nucleotide
ggagatcatcaaagga

SEQ ID NO: 1278 - DNA, 14 bp, Artificial Sequence
  Antisense nucleotide
ctcagcaatggtca

SEQ ID NO: 1279 - DNA, 14 bp, Artificial Sequence
  Antisense nucleotide
gatctcgaacacct

SEQ ID NO: 1280 - DNA, 18 bp, Artificial Sequence
  Antisense nucleotide
cacaatctcgatctttct

SEQ ID NO: 1281 - DNA, 18 bp, Artificial Sequence
  Antisense nucleotide
ccttcttaaagattggct

SEQ ID NO: 1282 - DNA, 14 bp, Artificial Sequence
  Antisense nucleotide
cacataccaactgg

SEQ ID NO: 1283 - DNA, 14 bp, Artificial Sequence
  Antisense nucleotide
agcttgatgtgagg

SEQ ID NO: 1284 - DNA, 18 bp, Artificial Sequence
  Antisense nucleotide
gaagttgtagcttgatgt

SEQ ID NO: 1285 - DNA, 16 bp, Artificial Sequence
  Antisense nucleotide
gcttgaagttgtagct

SEQ ID NO: 1286 - DNA, 16 bp, Artificial Sequence
  Antisense nucleotide
ctgcttgaagttgtag

SEQ ID NO: 1287 - DNA, 14 bp, Artificial Sequence
  Antisense nucleotide
gacacaactcctct

SEQ ID NO: 1288 - DNA, 18 bp, Artificial Sequence
  Antisense nucleotide
tcctttgatagacacaac

SEQ ID NO: 1289 - DNA, 16 bp, Artificial Sequence
  Antisense nucleotide
ctcgtttgatagacac

SEQ ID NO: 1290 - DNA, 14 bp, Artificial Sequence
  Antisense nucleotide
ggttagcacacact

SEQ ID NO: 1291 - DNA, 14 bp, Artificial Sequence
  Antisense nucleotide
ggtaacggttagca

SEQ ID NO: 1292 - DNA, 18 bp, Artificial Sequence
  Antisense nucleotide
cgtaacacatttagaagc

SEQ ID NO: 1293 - DNA, 14 bp, Artificial Sequence
  Antisense nucleotide
ctcatccgtaacac

SEQ ID NO: 1294 - DNA, 18 bp, Artificial Sequence
  Antisense nucleotide
ccggtaagtattgtagtt

SEQ ID NO: 1295 - DNA, 16 bp, Artificial Sequence
  Antisense nucleotide
ggtgtatttccttgac

SEQ ID NO: 1296 - DNA, 16 bp, Artificial Sequence
  Antisense nucleotide
acataccaactggtgt

SEQ ID NO: 1297 - DNA, 14 bp, Artificial Sequence
  Antisense nucleotide
gtccctatacgaac

SEQ ID NO: 1298 - DNA, 14 bp, Artificial Sequence
  Antisense nucleotide
ttcatgtctgtgcc

SEQ ID NO: 1299 - DNA, 14 bp, Artificial Sequence
  Antisense nucleotide
gtaggtgagttcca

SEQ ID NO: 1300 - DNA, 14 bp, Artificial Sequence
  Antisense nucleotide
gttgtgagcgatga

SEQ ID NO: 1301 - DNA, 18 bp, Artificial Sequence
  Antisense nucleotide
catagttgtcctcaaaga

SEQ ID NO: 1302 - DNA, 14 bp, Artificial Sequence
  Antisense nucleotide
ggcatagttgtcct

SEQ ID NO: 1303 - DNA, 14 bp, Artificial Sequence
  Antisense nucleotide
cattgtctagcacg

SEQ ID NO: 1304 - DNA, 14 bp, Artificial Sequence
  Antisense nucleotide
ctccattgtctagc

SEQ ID NO: 1305 - DNA, 14 bp, Artificial Sequence
  Antisense nucleotide
gtattgttcagcgg

SEQ ID NO: 1306 - DNA, 16 bp, Artificial Sequence
  Antisense nucleotide
tcaagatctctgtgag

SEQ ID NO: 1307 - DNA, 16 bp, Artificial Sequence
  Antisense nucleotide
cacaaaatcgtgtcct

SEQ ID NO: 1308 - DNA, 16 bp, Artificial Sequence
  Antisense nucleotide
tccttccacaaaatcg

SEQ ID NO: 1309 - DNA, 14 bp, Artificial Sequence
  Antisense nucleotide
gtggaagatgtcct

SEQ ID NO: 1310 - DNA, 16 bp, Artificial Sequence
  Antisense nucleotide
tcttgtggaagatgtc

SEQ ID NO: 1311 - DNA, 16 bp, Artificial Sequence
  Antisense nucleotide
tctatcagtgtgagag

SEQ ID NO: 1312 - DNA, 14 bp, Artificial Sequence
  Antisense nucleotide
ggttggtgtctatc

SEQ ID NO: 1313 - DNA, 14 bp, Artificial Sequence
  Antisense nucleotide
acatcggagaacag

SEQ ID NO: 1314 - DNA, 14 bp, Artificial Sequence
  Antisense nucleotide
ccttacacatcgga

SEQ ID NO: 1315 - DNA, 16 bp, Artificial Sequence
  Antisense nucleotide
acaatcctcagaactc

SEQ ID NO: 1316 - DNA, 14 bp, Artificial Sequence
  Antisense nucleotide
gctctgacaatcct

SEQ ID NO: 1317 - DNA, 14 bp, Artificial Sequence
  Antisense nucleotide
tggttgaagtggag

SEQ ID NO: 1318 - DNA, 14 bp, Artificial Sequence
  Antisense nucleotide
ctgtggttgaagtg

SEQ ID NO: 1319 - DNA, 14 bp, Artificial Sequence
  Antisense nucleotide
gttgtaggtgacca

SEQ ID NO: 1320 - DNA, 14 bp, Artificial Sequence
  Antisense nucleotide
ctgtgttgtaggtg

SEQ ID NO: 1321 - DNA, 14 bp, Artificial Sequence
  Antisense nucleotide
gactcaaacgtgtc

SEQ ID NO: 1322 - DNA, 14 bp, Artificial Sequence
  Antisense nucleotide
catggactcaaacg

SEQ ID NO: 1323 - DNA, 14 bp, Artificial Sequence
  Antisense nucleotide
cgaatgtataccgg

SEQ ID NO: 1324 - DNA, 14 bp, Artificial Sequence
  Antisense nucleotide
ccgaatgtataccg

SEQ ID NO: 1325 - DNA, 14 bp, Artificial Sequence
  Antisense nucleotide
gccgaatgtatacc

SEQ ID NO: 1326 - DNA, 14 bp, Artificial Sequence
  Antisense nucleotide
gtagttgtagggac

SEQ ID NO: 1327 - DNA, 18 bp, Artificial Sequence
  Antisense nucleotide
tagaaaggtagttgtagg

SEQ ID NO: 1328 - DNA, 18 bp, Artificial Sequence
  Antisense nucleotide
gtagaaaggtagttgtag

SEQ ID NO: 1329 - DNA, 16 bp, Artificial Sequence
  Antisense nucleotide
cgtagaaaggtagttg

SEQ ID NO: 1330 - DNA, 14 bp, Artificial Sequence
  Antisense nucleotide
ccgtagaaaggtag

SEQ ID NO: 1331 - DNA, 14 bp, Artificial Sequence
  Antisense nucleotide
gaccatagcacact

SEQ ID NO: 1332 - DNA, 14 bp, Artificial Sequence
  Antisense nucleotide
ggatattggcactg

SEQ ID NO: 1333 - DNA, 14 bp, Artificial Sequence
  Antisense nucleotide
cctggatattggca

SEQ ID NO: 1334 - DNA, 14 bp, Artificial Sequence
  Antisense nucleotide
gctcccaaagatct

SEQ ID NO: 1335 - DNA, 14 bp, Artificial Sequence
  Antisense nucleotide
cccatcaaagctct

SEQ ID NO: 1336 - DNA, 14 bp, Artificial Sequence
  Antisense nucleotide
caaacacttggagc

SEQ ID NO: 1337 - DNA, 16 bp, Artificial Sequence
  Antisense nucleotide
gtctcaaacacttgga

SEQ ID NO: 1338 - DNA, 16 bp, Artificial Sequence
  Antisense nucleotide
gagtctcaaacacttg

SEQ ID NO: 1339 - DNA, 16 bp, Artificial Sequence
  Antisense nucleotide
gtaacctgtgatctct

SEQ ID NO: 1340 - DNA, 14 bp, Artificial Sequence
  Antisense nucleotide
ggtaacctgtgatc

SEQ ID NO: 1341 - DNA, 16 bp, Artificial Sequence
  Antisense nucleotide
gtataggtaacctgtg

SEQ ID NO: 1342 - DNA, 18 bp, Artificial Sequence
  Antisense nucleotide
tgagatgtataggtaacc

SEQ ID NO: 1343 - DNA, 16 bp, Artificial Sequence
  Antisense nucleotide
tgctgagatgtatagg

SEQ ID NO: 1344 - DNA, 14 bp, Artificial Sequence
  Antisense nucleotide
ccatgctgagatgt

SEQ ID NO: 1345 - DNA, 14 bp, Artificial Sequence
  Antisense nucleotide
ggattacttgcagg

SEQ ID NO: 1346 - DNA, 16 bp, Artificial Sequence
  Antisense nucleotide
tgttatggtggatgag

SEQ ID NO: 1347 - DNA, 14 bp, Artificial Sequence
  Antisense nucleotide
ggtgttatggtgga

SEQ ID NO: 1348 - DNA, 14 bp, Artificial Sequence
  Antisense nucleotide
gcagttgacacact

SEQ ID NO: 1349 - DNA, 14 bp, Artificial Sequence
  Antisense nucleotide
agtactcggcattc

SEQ ID NO: 1350 - DNA, 16 bp, Artificial Sequence
  Antisense nucleotide
cattcacatactccct

SEQ ID NO: 1351 - DNA, 16 bp, Artificial Sequence
  Antisense nucleotide
tccaaaacaggtcact

SEQ ID NO: 1352 - DNA, 14 bp, Artificial Sequence
  Antisense nucleotide
ggtccttatagtgg

SEQ ID NO: 1353 - DNA, 14 bp, Artificial Sequence
  Antisense nucleotide
cagaatgccaacca

SEQ ID NO: 1354 - DNA, 14 bp, Artificial Sequence
  Antisense nucleotide
acgagaatgccaac

SEQ ID NO: 1355 - DNA, 14 bp, Artificial Sequence
  Antisense nucleotide
gatcccaaagacca

SEQ ID NO: 1356 - DNA, 14 bp, Artificial Sequence
  Antisense nucleotide
tcgcttgatgagga

SEQ ID NO: 1357 - DNA, 14 bp, Artificial Sequence
  Antisense nucleotide
catcgtgtacttcc

SEQ ID NO: 1358 - DNA, 14 bp, Artificial Sequence
  Antisense nucleotide
gcatcgtgtacttc

SEQ ID NO: 1359 - DNA, 14 bp, Artificial Sequence
  Antisense nucleotide
actgtgccaaaagc

SEQ ID NO: 1360 - DNA, 14 bp, Artificial Sequence
  Antisense nucleotide
cttgtagactgtgc

SEQ ID NO: 1361 - DNA, 14 bp, Artificial Sequence
  Antisense nucleotide
cccttgtagactgt

SEQ ID NO: 1362 - DNA, 16 bp, Artificial Sequence
  Antisense nucleotide
tcaacactttgatggc

SEQ ID NO: 1363 - DNA, 14 bp, Artificial Sequence
  Antisense nucleotide
ccctcaacactttg

SEQ ID NO: 1364 - DNA, 16 bp, Artificial Sequence
  Antisense nucleotide
gtgttttccctcaaca

SEQ ID NO: 1365 - DNA, 16 bp, Artificial Sequence
  Antisense nucleotide
gtatgcttcgtctaag

SEQ ID NO: 1366 - DNA, 14 bp, Artificial Sequence
  Antisense nucleotide
cgtatgcttcgtct

SEQ ID NO: 1367 - DNA, 14 bp, Artificial Sequence
  Antisense nucleotide
ccatcacgtatgct

SEQ ID NO: 1368 - DNA, 14 bp, Artificial Sequence
  Antisense nucleotide
gcataagctgtgtc

SEQ ID NO: 1369 - DNA, 14 bp, Artificial Sequence
  Antisense nucleotide
catggtctaagagg

SEQ ID NO: 1370 - DNA, 16 bp, Artificial Sequence
  Antisense nucleotide
caatctgcatacacca

SEQ ID NO: 1371 - DNA, 14 bp, Artificial Sequence
  Antisense nucleotide
ggcaatctgcatac

SEQ ID NO: 1372 - DNA, 14 bp, Artificial Sequence
  Antisense nucleotide
ctgtctcgtcaatg

SEQ ID NO: 1373 - DNA, 16 bp, Artificial Sequence
  Antisense nucleotide
cataactccacacatc

SEQ ID NO: 1374 - DNA, 16 bp, Artificial Sequence
  Antisense nucleotide
agtcacaccataactc

SEQ ID NO: 1375 - DNA, 16 bp, Artificial Sequence
  Antisense nucleotide
acagtcacaccataac

SEQ ID NO: 1376 - DNA, 14 bp, Artificial Sequence
  Antisense nucleotide
ccccaaaagtcatc

SEQ ID NO: 1377 - DNA, 14 bp, Artificial Sequence
  Antisense nucleotide
tcgtaaggtttggc

SEQ ID NO: 1378 - DNA, 14 bp, Artificial Sequence
  Antisense nucleotide
gatcccatcgtaag

SEQ ID NO: 1379 - DNA, 14 bp, Artificial Sequence
  Antisense nucleotide
caatggtgcagatg

SEQ ID NO: 1380 - DNA, 14 bp, Artificial Sequence
  Antisense nucleotide
gacatcaatggtgc

SEQ ID NO: 1381 - DNA, 16 bp, Artificial Sequence
  Antisense nucleotide
gtagacatcaatggtg

SEQ ID NO: 1382 - DNA, 18 bp, Artificial Sequence
  Antisense nucleotide
catgatcatgtagacatc

SEQ ID NO: 1383 - DNA, 16 bp, Artificial Sequence
  Antisense nucleotide
ccatgatcatgtagac

SEQ ID NO: 1384 - DNA, 18 bp, Artificial Sequence
  Antisense nucleotide
catttgaccatgatcatg

SEQ ID NO: 1385 - DNA, 16 bp, Artificial Sequence
  Antisense nucleotide
ccaacatttgaccatg

SEQ ID NO: 1386 - DNA, 18 bp, Artificial Sequence
  Antisense nucleotide
tcatccaacatttgacca

SEQ ID NO: 1387 - DNA, 18 bp, Artificial Sequence
  Antisense nucleotide
gagtcaatcatccaacat

SEQ ID NO: 1388 - DNA, 16 bp, Artificial Sequence
  Antisense nucleotide
cagagtcaatcatcca

SEQ ID NO: 1389 - DNA, 14 bp, Artificial Sequence
  Antisense nucleotide
ccgacattcagagt

SEQ ID NO: 1390 - DNA, 16 bp, Artificial Sequence
  Antisense nucleotide
gaattcagacaccaac

SEQ ID NO: 1391 - DNA, 14 bp, Artificial Sequence
  Antisense nucleotide
gatgaccacaaagc

SEQ ID NO: 1392 - DNA, 16 bp, Artificial Sequence
  Antisense nucleotide
ccatcaaatacatcgg

SEQ ID NO: 1393 - DNA, 18 bp, Artificial Sequence
  Antisense nucleotide
tcaccatcaaatacatcg

SEQ ID NO: 1394 - DNA, 14 bp, Artificial Sequence
  Antisense nucleotide
caacgtagccatca

SEQ ID NO: 1395 - DNA, 14 bp, Artificial Sequence
  Antisense nucleotide
acgtctttgacgac

SEQ ID NO: 1396 - DNA, 18 bp, Artificial Sequence
  Antisense nucleotide
caaaaacgtctttgacga

SEQ ID NO: 1397 - DNA, 16 bp, Artificial Sequence
  Antisense nucleotide
ggcaaaaacgtctttg

SEQ ID NO: 1398 - DNA, 16 bp, Artificial Sequence
  Antisense nucleotide
caaaggcaaaaacgtc

SEQ ID NO: 1399 - DNA, 14 bp, Artificial Sequence
  Antisense nucleotide
gtgtcaagtactcg

SEQ ID NO: 1400 - DNA, 16 bp, Artificial Sequence
  Antisense nucleotide
gtaatagaggttgtcg

SEQ ID NO: 1401 - DNA, 14 bp, Artificial Sequence
  Antisense nucleotide
cccagtaatagagg

SEQ ID NO: 1402 - DNA, 14 bp, Artificial Sequence
  Antisense nucleotide
catggtgctcactg

SEQ ID NO: 1403 - DNA, 14 bp, Artificial Sequence
  Antisense nucleotide
gtgcctgtacgtac

SEQ ID NO: 1404 - DNA, 14 bp, Artificial Sequence
  Antisense nucleotide
tgcaggtggatagt

SEQ ID NO: 1405 - DNA, 18 bp, Artificial Sequence
  Antisense nucleotide
catgtcgatagtcttgca

SEQ ID NO: 1406 - DNA, 14 bp, Artificial Sequence
  Antisense nucleotide
gtcgatagtcttgc

SEQ ID NO: 1407 - DNA, 14 bp, Artificial Sequence
  Antisense nucleotide
ccatgtcgatagtc

SEQ ID NO: 1408 - DNA, 14 bp, Artificial Sequence
  Antisense nucleotide
ctccatgtcgatag

SEQ ID NO: 1409 - DNA, 14 bp, Artificial Sequence
  Antisense nucleotide
cttggacaggatct

SEQ ID NO: 1410 - DNA, 14 bp, Artificial Sequence
  Antisense nucleotide
tgctgttgtacagg

SEQ ID NO: 1411 - DNA, 14 bp, Artificial Sequence
  Antisense nucleotide
gtgctgttgtacag

SEQ ID NO: 1412 - DNA, 14 bp, Artificial Sequence
  Antisense nucleotide
ttggcgtagtagtc

SEQ ID NO: 1413 - DNA, 14 bp, Artificial Sequence
  Antisense nucleotide
tccaccattagcac

SEQ ID NO: 1414 - DNA, 14 bp, Artificial Sequence
  Antisense nucleotide
gatttcgttgtggg

SEQ ID NO: 1415 - DNA, 18 bp, Artificial Sequence
  Antisense nucleotide
gtcatagatttcgttgtg

SEQ ID NO: 1416 - DNA, 16 bp, Artificial Sequence
  Antisense nucleotide
tgtactctgcttgaac

SEQ ID NO: 1417 - DNA, 14 bp, Artificial Sequence
  Antisense nucleotide
gtgtactctgcttg

SEQ ID NO: 1418 - DNA, 14 bp, Artificial Sequence
  Antisense nucleotide
tgctgtgtgtactc

SEQ ID NO: 1419 - DNA, 18 bp, Artificial Sequence
  Antisense nucleotide
ctgatgtgttgaagaaca

SEQ ID NO: 1420 - DNA, 16 bp, Artificial Sequence
  Antisense nucleotide
ctctgatgtgttgaag

SEQ ID NO: 1421 - DNA, 14 bp, Artificial Sequence
  Antisense nucleotide
gctctgatgtgttg

SEQ ID NO: 1422 - DNA, 14 bp, Artificial Sequence
  Antisense nucleotide
gagctctgatgtgt

SEQ ID NO: 1423 - DNA, 18 bp, Artificial Sequence
  Antisense nucleotide
cacttttaacttgagcct

SEQ ID NO: 1424 - DNA, 18 bp, Artificial Sequence
  Antisense nucleotide
ctccacttttaacttgag

SEQ ID NO: 1425 - DNA, 18 bp, Artificial Sequence
  Antisense nucleotide
tgctgtatttctggtaca

SEQ ID NO: 1426 - DNA, 14 bp, Artificial Sequence
  Antisense nucleotide
ccaggaattgttgc

SEQ ID NO: 1427 - DNA, 14 bp, Artificial Sequence
  Antisense nucleotide
ttgctgaggtatcg

SEQ ID NO: 1428 - DNA, 14 bp, Artificial Sequence
  Antisense nucleotide
gataaccactctgg

SEQ ID NO: 1429 - DNA, 18 bp, Artificial Sequence
  Antisense nucleotide
caaaagataaccactctg

SEQ ID NO: 1430 - DNA, 15 bp, Artificial Sequence
  Antisense nucleotide
cggtgacatcaaaag

SEQ ID NO: 1431 - DNA, 14 bp, Artificial Sequence
  Antisense nucleotide
cctcaatttcccct

SEQ ID NO: 1432 - DNA, 14 bp, Artificial Sequence
  Antisense nucleotide
gttatccctgctgt

SEQ ID NO: 1433 - DNA, 14 bp, Artificial Sequence
  Antisense nucleotide
gcagtgtgttatcc

SEQ ID NO: 1434 - DNA, 14 bp, Artificial Sequence
  Antisense nucleotide
gatgtccacttgca

SEQ ID NO: 1435 - DNA, 14 bp, Artificial Sequence
  Antisense nucleotide
tagtgaacccgttg

SEQ ID NO: 1436 - DNA, 14 bp, Artificial Sequence
  Antisense nucleotide
tgccatgaatggtg

SEQ ID NO: 1437 - DNA, 16 bp, Artificial Sequence
  Antisense nucleotide
gttcatgccatgaatg

SEQ ID NO: 1438 - DNA, 14 bp, Artificial Sequence
  Antisense nucleotide
catgagaagcagga

SEQ ID NO: 1439 - DNA, 14 bp, Artificial Sequence
  Antisense nucleotide
gctttgcagatgct

SEQ ID NO: 1440 - DNA, 14 bp, Artificial Sequence
  Antisense nucleotide
gagctttgcagatg

SEQ ID NO: 1441 - DNA, 14 bp, Artificial Sequence
  Antisense nucleotide
tagttggtgtccag

SEQ ID NO: 1442 - DNA, 16 bp, Artificial Sequence
  Antisense nucleotide
ctgaagcaatagttgg

SEQ ID NO: 1443 - DNA, 18 bp, Artificial Sequence
  Antisense nucleotide
agctgaagcaatagttgg

SEQ ID NO: 1444 - DNA, 14 bp, Artificial Sequence
  Antisense nucleotide
ggagctgaagcaat

SEQ ID NO: 1445 - DNA, 14 bp, Artificial Sequence
  Antisense nucleotide
caatgtacagctgc

SEQ ID NO: 1446 - DNA, 16 bp, Artificial Sequence
  Antisense nucleotide
ggaagtcaatgtacag

SEQ ID NO: 1447 - DNA, 15 bp, Artificial Sequence
  Antisense nucleotide
cggaagtcaatgtac

SEQ ID NO: 1448 - DNA, 14 bp, Artificial Sequence
  Antisense nucleotide
gcggaagtcaatgt

SEQ ID NO: 1449 - DNA, 14 bp, Artificial Sequence
  Antisense nucleotide
agttggcatggtag

SEQ ID NO: 1450 - DNA, 14 bp, Artificial Sequence
  Antisense nucleotide
gcagaagttggcat

SEQ ID NO: 1451 - DNA, 14 bp, Artificial Sequence
  Antisense nucleotide
ctccaaatgtaggg

SEQ ID NO: 1452 - DNA, 14 bp, Artificial Sequence
  Antisense nucleotide
accttgctgtactg

SEQ ID NO: 1453 - DNA, 14 bp, Artificial Sequence
  Antisense nucleotide
tgctggttgtacag

SEQ ID NO: 1454 - DNA, 14 bp, Artificial Sequence
  Antisense nucleotide
ggttatgctggttg

SEQ ID NO: 1455 - DNA, 14 bp, Artificial Sequence
  Antisense nucleotide
gtagtacacgatgg

SEQ ID NO: 1456 - DNA, 14 bp, Artificial Sequence
  Antisense nucleotide
cgtagtacacgatg

SEQ ID NO: 1457 - DNA, 14 bp, Artificial Sequence
  Antisense nucleotide
cacgtagtacacga

SEQ ID NO: 1458 - DNA, 14 bp, Artificial Sequence
  Antisense nucleotide
catgttggacagct

SEQ ID NO: 1459 - DNA, 14 bp, Artificial Sequence
  Antisense nucleotide
gcacgatcatgttg

SEQ ID NO: 1460 - DNA, 14 bp, Artificial Sequence
  Antisense nucleotide
cacacagtagtgca

SEQ ID NO: 1461 - DNA, 14 bp, Artificial Sequence
  Antisense nucleotide
gatcagaaaagcgc

SEQ ID NO: 1462 - DNA, 14 bp, Artificial Sequence
  Antisense nucleotide
accgtgaccagatg

SEQ ID NO: 1463 - DNA, 14 bp, Artificial Sequence
  Antisense nucleotide
gtagacaggctgag

SEQ ID NO: 1464 - DNA, 14 bp, Artificial Sequence
  Antisense nucleotide
tatcgagtgtgctg

SEQ ID NO: 1465 - DNA, 14 bp, Artificial Sequence
  Antisense nucleotide
ttgcgcatgaactg

SEQ ID NO: 1466 - DNA, 14 bp, Artificial Sequence
  Antisense nucleotide
ttgctcaggatctg

SEQ ID NO: 1467 - DNA, 14 bp, Artificial Sequence
  Antisense nucleotide
actggtgagcttca

SEQ ID NO: 1468 - DNA, 14 bp, Artificial Sequence
  Antisense nucleotide
gctcaggatagtct

SEQ ID NO: 1469 - DNA, 18 bp, Artificial Sequence
  Antisense nucleotide
tgtagatggaaatcacct

SEQ ID NO: 1470 - DNA, 14 bp, Artificial Sequence
  Antisense nucleotide
tggtgctgttgtag

SEQ ID NO: 1471 - DNA, 14 bp, Artificial Sequence
  Antisense nucleotide
ttctcctggagcaa

SEQ ID NO: 1472 - DNA, 14 bp, Artificial Sequence
  Antisense nucleotide
tactcttcgtcgct

SEQ ID NO: 1473 - DNA, 14 bp, Artificial Sequence
  Antisense nucleotide
cttggcgtagtact

SEQ ID NO: 1474 - DNA, 18 bp, Artificial Sequence
  Antisense nucleotide
cggcatgtctattttgta

SEQ ID NO: 1475 - DNA, 14 bp, Artificial Sequence
  Antisense nucleotide
cgggatggcatttt

SEQ ID NO: 1476 - DNA, 14 bp, Artificial Sequence
  Antisense nucleotide
ctgtagaaagtggg

SEQ ID NO: 1477 - DNA, 18 bp, Artificial Sequence
  Antisense nucleotide
acaattctgaagtagggt

SEQ ID NO: 1478 - DNA, 18 bp, Artificial Sequence
  Antisense nucleotide
attgctgagacgtcaaat

SEQ ID NO: 1479 - DNA, 14 bp, Artificial Sequence
  Antisense nucleotide
tctccattgctgag

SEQ ID NO: 1480 - DNA, 18 bp, Artificial Sequence
  Antisense nucleotide
tcaccaaattggaagcat

SEQ ID NO: 1481 - DNA, 14 bp, Artificial Sequence
  Antisense nucleotide
ctctgaactctgct

SEQ ID NO: 1482 - DNA, 18 bp, Artificial Sequence
  Antisense nucleotide
aacgaaagactctgaact

SEQ ID NO: 1483 - DNA, 14 bp, Artificial Sequence
  Antisense nucleotide
tgggttctgcaaac

SEQ ID NO: 1484 - DNA, 14 bp, Artificial Sequence
  Antisense nucleotide
ctggcttttgggtt

SEQ ID NO: 1485 - DNA, 14 bp, Artificial Sequence
  Antisense nucleotide
gttgttcaggcact

SEQ ID NO: 1486 - DNA, 18 bp, Artificial Sequence
  Antisense nucleotide
tctgatatagctcaatcc

SEQ ID NO: 1487 - DNA, 18 bp, Artificial Sequence
  Antisense nucleotide
tctttggacttgagaatc

SEQ ID NO: 1488 - DNA, 14 bp, Artificial Sequence
  Antisense nucleotide
tgggttggagatgt

SEQ ID NO: 1489 - DNA, 14 bp, Artificial Sequence
  Antisense nucleotide
tgctgtcgatgtag

SEQ ID NO: 1490 - DNA, 16 bp, Artificial Sequence
  Antisense nucleotide
acaactttgctgtcga

SEQ ID NO: 1491 - DNA, 14 bp, Artificial Sequence
  Antisense nucleotide
attcgccttctgct

SEQ ID NO: 1492 - DNA, 14 bp, Artificial Sequence
  Antisense nucleotide
gaaggagagccatt

SEQ ID NO: 1493 - DNA, 16 bp, Artificial Sequence
  Antisense nucleotide
tcagttacatcgaagg

SEQ ID NO: 1494 - DNA, 18 bp, Artificial Sequence
  Antisense nucleotide
tgaagccattcatgaaca

SEQ ID NO: 1495 - DNA, 16 bp, Artificial Sequence
  Antisense nucleotide
tcctgtctttatggtg

SEQ ID NO: 1496 - DNA, 14 bp, Artificial Sequence
  Antisense nucleotide
aaatcccaggttcc

SEQ ID NO: 1497 - DNA, 18 bp, Artificial Sequence
  Antisense nucleotide
ggacagtgtaagcttatt

SEQ ID NO: 1498 - DNA, 16 bp, Artificial Sequence
  Antisense nucleotide
gtacaaaagtgcagca

SEQ ID NO: 1499 - DNA, 18 bp, Artificial Sequence
  Antisense nucleotide
tagatggtacaaaagtgc

SEQ ID NO: 1500 - DNA, 20 bp, Artificial Sequence
  Antisense nucleotide
cacttttatttgggatgatg

SEQ ID NO: 1501 - DNA, 18 bp, Artificial Sequence
  Antisense nucleotide
gcaaatcttgcttctagt

SEQ ID NO: 1502 - DNA, 14 bp, Artificial Sequence
  Antisense nucleotide
gtgccatcaatacc

SEQ ID NO: 1503 - DNA, 14 bp, Artificial Sequence
  Antisense nucleotide
ggtatatgtggagg

SEQ ID NO: 1504 - DNA, 14 bp, Artificial Sequence
  Antisense nucleotide
tctgatcaccactg

SEQ ID NO: 1505 - DNA, 18 bp, Artificial Sequence
  Antisense nucleotide
tcctagtggactttatag

SEQ ID NO: 1506 - DNA, 16 bp, Artificial Sequence
  Antisense nucleotide
tttttcctagtggact

SEQ ID NO: 1507 - DNA, 16 bp, Artificial Sequence
  Antisense nucleotide
caataacattagcagg

SEQ ID NO: 1508 - DNA, 14 bp, Artificial Sequence
  Antisense nucleotide
aagtctgtaggagg

SEQ ID NO: 1509 - DNA, 16 bp, Artificial Sequence
  Antisense nucleotide
tctgttgtgactcaag

SEQ ID NO: 1510 - DNA, 14 bp, Artificial Sequence
  Antisense nucleotide
gttggtctgttgtg

SEQ ID NO: 1511 - DNA, 14 bp, Artificial Sequence
  Antisense nucleotide
caaagcacgcttct

SEQ ID NO: 1512 - DNA, 18 bp, Artificial Sequence
  Antisense nucleotide
tttctaaagcaataggcc

SEQ ID NO: 1513 - DNA, 16 bp, Artificial Sequence
  Antisense nucleotide
gcaattatcctgcaca

SEQ ID NO: 1514 - DNA, 14 bp, Artificial Sequence
  Antisense nucleotide
acgtaggcagcaat

SEQ ID NO: 1515 - DNA, 18 bp, Artificial Sequence
  Antisense nucleotide
atcaatgtaaagtggacg

SEQ ID NO: 1516 - DNA, 14 bp, Artificial Sequence
  Antisense nucleotide
ctagatccctcttg

SEQ ID NO: 1517 - DNA, 14 bp, Artificial Sequence
  Antisense nucleotide
ccatttccacccta

SEQ ID NO: 1518 - DNA, 14 bp, Artificial Sequence
  Antisense nucleotide
tgggttcgtgtatc

SEQ ID NO: 1519 - DNA, 14 bp, Artificial Sequence
  Antisense nucleotide
tggcattgtaccct

SEQ ID NO: 1520 - DNA, 14 bp, Artificial Sequence
  Antisense nucleotide
tccagcacagaagt

SEQ ID NO: 1521 - DNA, 16 bp, Artificial Sequence
  Antisense nucleotide
ataaatacgggcatgc

SEQ ID NO: 1522 - DNA, 14 bp, Artificial Sequence
  Antisense nucleotide
agtgtctgaactcc

SEQ ID NO: 1523 - DNA, 14 bp, Artificial Sequence
  Antisense nucleotide
tgtgctgagtgtct

SEQ ID NO: 1524 - DNA, 14 bp, Artificial Sequence
  Antisense nucleotide
ataagctcaggacc

SEQ ID NO: 1525 - DNA, 14 bp, Artificial Sequence
  Antisense nucleotide
aggagaagcagatg

SEQ ID NO: 1526 - DNA, 14 bp, Artificial Sequence
  Antisense nucleotide
agcaaggagaagca

SEQ ID NO: 1527 - DNA, 14 bp, Artificial Sequence
  Antisense nucleotide
aatcttgggacacg

SEQ ID NO: 1528 - DNA, 18 bp, Artificial Sequence
  Antisense nucleotide
tagagaatggttagaggt

SEQ ID NO: 1529 - DNA, 18 bp, Artificial Sequence
  Antisense nucleotide
gttttgccaatgtagtag

SEQ ID NO: 1530 - DNA, 14 bp, Artificial Sequence
  Antisense nucleotide
cttgggtgttttgc

SEQ ID NO: 1531 - DNA, 16 bp, Artificial Sequence
  Antisense nucleotide
gcaagactttacaatc

SEQ ID NO: 1532 - DNA, 18 bp, Artificial Sequence
  Antisense nucleotide
gcatttgcaagactttac

SEQ ID NO: 1533 - DNA, 18 bp, Artificial Sequence
  Antisense nucleotide
tttagctgcatttgcaag

SEQ ID NO: 1534 - DNA, 14 bp, Artificial Sequence
  Antisense nucleotide
gccacttttccaag

SEQ ID NO: 1535 - DNA, 14 bp, Artificial Sequence
  Antisense nucleotide
ttggtcttgccact

SEQ ID NO: 1536 - DNA, 14 bp, Artificial Sequence
  Antisense nucleotide
cagcacacagtagt

SEQ ID NO: 1537 - DNA, 14 bp, Artificial Sequence
  Antisense nucleotide
cgatagtcttgcag

SEQ ID NO: 1538 - DNA, 18 bp, Artificial Sequence
  Antisense nucleotide
ctttcaccaaattggaag

SEQ ID NO: 1539 - DNA, 15 bp, Artificial Sequence
  Antisense nucleotide
caccaaattggaagc

SEQ ID NO: 1540 - DNA, 16 bp, Artificial Sequence
  Antisense nucleotide
tcaccaaattggaagc

SEQ ID NO: 1541 - DNA, 14 bp, Artificial Sequence
  Antisense nucleotide
ctctggcttttggg

SEQ ID NO: 1542 - DNA, 16 bp, Artificial Sequence
  Antisense nucleotide
cggcatgtctattttg

SEQ ID NO: 1543 - DNA, 14 bp, Artificial Sequence
  Antisense nucleotide
cactacagacgagc

SEQ ID NO: 1544 - DNA, 15 bp, Artificial Sequence
  Antisense nucleotide
cgtgcactacagacg

SEQ ID NO: 1545 - DNA, 14 bp, Artificial Sequence
  Antisense nucleotide
ggaacagttcgtcc

SEQ ID NO: 1546 - DNA, 16 bp, Artificial Sequence
  Antisense nucleotide
gaacagttcgtccatg

SEQ ID NO: 1547 - DNA, 15 bp, Artificial Sequence
  Antisense nucleotide
ccagagtttcggttc

SEQ ID NO: 1548 - DNA, 15 bp, Artificial Sequence
  Antisense nucleotide
ctaggactgggacag

SEQ ID NO: 1549 - DNA, 13 bp, Artificial Sequence
  Antisense nucleotide
cgcacttgtagcg

SEQ ID NO: 1550 - DNA, 14 bp, Artificial Sequence
  Antisense nucleotide
ctcgcacttgtagc

SEQ ID NO: 1551 - DNA, 11 bp, Artificial Sequence
  Antisense nucleotide
gcacttgtagc

SEQ ID NO: 1552 - DNA, 14 bp, Artificial Sequence
  Antisense nucleotide
gcgcactgtccctg

SEQ ID NO: 1553 - DNA, 14 bp, Artificial Sequence
  Antisense nucleotide
ccagggagatgcgc

SEQ ID NO: 1554 - DNA, 13 bp, Artificial Sequence
  Antisense nucleotide
gccggtgaggagg

SEQ ID NO: 1555 - DNA, 13 bp, Artificial Sequence
  Antisense nucleotide
ccggtgaggaggg

SEQ ID NO: 1556 - DNA, 13 bp, Artificial Sequence
  Antisense nucleotide
cggttcactcggc

SEQ ID NO: 1557 - DNA, 16 bp, Artificial Sequence
  Antisense nucleotide
gagtttcggttcactc

SEQ ID NO: 1558 - DNA, 16 bp, Artificial Sequence
  Antisense nucleotide
ggcacgattgtcaaag

SEQ ID NO: 1559 - DNA, 14 bp, Artificial Sequence
  Antisense nucleotide
caggcgtcaccccc

SEQ ID NO: 1560 - DNA, 13 bp, Artificial Sequence
  Antisense nucleotide
gcaggcgtcaccc

SEQ ID NO: 1561 - DNA, 13 bp, Artificial Sequence
  Antisense nucleotide
ctccctcctaagc

SEQ ID NO: 1562 - DNA, 13 bp, Artificial Sequence
  Antisense nucleotide
ccctcctaagcgg

SEQ ID NO: 1563 - DNA, 14 bp, Artificial Sequence
  Antisense nucleotide
cgagtccgcgttcg

SEQ ID NO: 1564 - DNA, 15 bp, Artificial Sequence
  Antisense nucleotide
catcttctgccattc

SEQ ID NO: 1565 - DNA, 15 bp, Artificial Sequence
  Antisense nucleotide
gtgttttcccaccag

SEQ ID NO: 1566 - DNA, 16 bp, Artificial Sequence
  Antisense nucleotide
ggttttggttcactag

SEQ ID NO: 1567 - DNA, 16 bp, Artificial Sequence
  Antisense nucleotide
gcatcttcacgtctcc

SEQ ID NO: 1568 - DNA, 16 bp, Artificial Sequence
  Antisense nucleotide
cttcacgtctcctgtc

SEQ ID NO: 1569 - DNA, 14 bp, Artificial Sequence
  Antisense nucleotide
gtcaccgcgtagtc

SEQ ID NO: 1570 - DNA, 15 bp, Artificial Sequence
  Antisense nucleotide
caaataggcaaggtc

SEQ ID NO: 1571 - DNA, 16 bp, Artificial Sequence
  Antisense nucleotide
cttgcaaataggcaag

SEQ ID NO: 1572 - DNA, 14 bp, Artificial Sequence
  Antisense nucleotide
tgcttgcaaatagg

SEQ ID NO: 1573 - DNA, 15 bp, Artificial Sequence
  Antisense nucleotide
ctgcttgcaaatagg

SEQ ID NO: 1574 - DNA, 14 bp, Artificial Sequence
  Antisense nucleotide
gcaggtggatattt

SEQ ID NO: 1575 - DNA, 13 bp, Artificial Sequence
  Antisense nucleotide
ctgctgttggcag

SEQ ID NO: 1576 - DNA, 15 bp, Artificial Sequence
  Antisense nucleotide
cactagtttccaagt

SEQ ID NO: 1577 - DNA, 15 bp, Artificial Sequence
  Antisense nucleotide
gttttggttcactag

SEQ ID NO: 1578 - DNA, 17 bp, Artificial Sequence
  Antisense nucleotide
ctttgatttcaggatag

SEQ ID NO: 1579 - DNA, 17 bp, Artificial Sequence
  Antisense nucleotide
gcacttcttctttatct

SEQ ID NO: 1580 - DNA, 15 bp, Artificial Sequence
  Antisense nucleotide
ccaagtcagatttcc

SEQ ID NO: 1581 - DNA, 18 bp, Artificial Sequence
  Antisense nucleotide
gtttccaagtcagatttc

SEQ ID NO: 1582 - DNA, 15 bp, Artificial Sequence
  Antisense nucleotide
ggttcactagtttcc

SEQ ID NO: 1583 - DNA, 16 bp, Artificial Sequence
  Antisense nucleotide
ggttttggttcactag

SEQ ID NO: 1584 - DNA, 15 bp, Artificial Sequence
  Antisense nucleotide
ccgaaaaattgggca

SEQ ID NO: 1585 - DNA, 13 bp, Artificial Sequence
  Antisense nucleotide
ccgaaaaattggg

SEQ ID NO: 1586 - DNA, 16 bp, Artificial Sequence
  Antisense nucleotide
ctatccgaaaaattgg

SEQ ID NO: 1587 - DNA, 17 bp, Artificial Sequence
  Antisense nucleotide
gttgataatgtcatcag

SEQ ID NO: 1588 - DNA, 17 bp, Artificial Sequence
  Antisense nucleotide
ctcatgttgataatgtc

SEQ ID NO: 1589 - DNA, 14 bp, Artificial Sequence
  Antisense nucleotide
ctgtcaccgcgtag

SEQ ID NO: 1590 - DNA, 15 bp, Artificial Sequence
  Antisense nucleotide
cgtctcctgtcaccg

SEQ ID NO: 1591 - DNA, 14 bp, Artificial Sequence
  Antisense nucleotide
cttcacgtctcctg

SEQ ID NO: 1592 - DNA, 17 bp, Artificial Sequence
  Antisense nucleotide
gagaactttatcatgtc

SEQ ID NO: 1593 - DNA, 13 bp, Artificial Sequence
  Antisense nucleotide
gctatatgcaggg

SEQ ID NO: 1594 - DNA, 18 bp, Artificial Sequence
  Antisense nucleotide
ccagctgctatatgcagg

SEQ ID NO: 1595 - DNA, 16 bp, Artificial Sequence
  Antisense nucleotide
aggctaaattttgcct

SEQ ID NO: 1596 - DNA, 14 bp, Artificial Sequence
  Antisense nucleotide
ggctaaattttgcc

SEQ ID NO: 1597 - DNA, 17 bp, Artificial Sequence
  Antisense nucleotide
ggctaaattttgccttc

SEQ ID NO: 1598 - DNA, 17 bp, Artificial Sequence
  Antisense nucleotide
gcaggctaaattttgcc

SEQ ID NO: 1599 - DNA, 14 bp, Artificial Sequence
  Antisense nucleotide
gagttacccaagcg

SEQ ID NO: 1600 - DNA, 16 bp, Artificial Sequence
  Antisense nucleotide
cagagttacccaagcg

SEQ ID NO: 1601 - DNA, 14 bp, Artificial Sequence
  Antisense nucleotide
cagagttacccaag

SEQ ID NO: 1602 - DNA, 15 bp, Artificial Sequence
  Antisense nucleotide
acagagttacccaag

SEQ ID NO: 1603 - DNA, 14 bp, Artificial Sequence
  Antisense nucleotide
ggtgcaaaacagag

SEQ ID NO: 1604 - DNA, 15 bp, Artificial Sequence
  Antisense nucleotide
ctaggtgcaaaacag

SEQ ID NO: 1605 - DNA, 18 bp, Artificial Sequence
  Antisense nucleotide
gagaactttatcatgtcc

SEQ ID NO: 1606 - DNA, 14 bp, Artificial Sequence
  Antisense nucleotide
gctagatgaatggc

SEQ ID NO: 1607 - DNA, 15 bp, Artificial
  Antisense nucleotide
gcaaacatggcaggc

SEQ ID NO: 1608 - DNA, 14 bp, Artificial Sequence
  Antisense nucleotide
cagcaaacatggca

SEQ ID NO: 1609 - DNA, 14 bp, Artificial Sequence
  Antisense nucleotide
gcagcaaacatggc

SEQ ID NO: 1610 - DNA, 14 bp, Artificial Sequence
  Antisense nucleotide
agcagcaaacatgg

SEQ ID NO: 1611 - DNA, 14 bp, Artificial Sequence
  Antisense nucleotide
cagcagcaaacatg

SEQ ID NO: 1612 - DNA, 14 bp, Artificial Sequence
  Antisense nucleotide
agcagcagcaaaca

SEQ ID NO: 1613 - DNA, 15 bp, Artificial Sequence
  Antisense nucleotide
cagcagcagcaaaca

SEQ ID NO: 1614 - DNA, 14 bp, Artificial Sequence
  Antisense nucleotide
cagcagcagcaaac

SEQ ID NO: 1615 - DNA, 14 bp, Artificial Sequence
  Antisense nucleotide
caccagcagcagca

SEQ ID NO: 1616 - DNA, 14 bp, Artificial Sequence
  Antisense nucleotide
gcattgacgtcagc

SEQ ID NO: 1617 - DNA, 15 bp, Artificial Sequence
  Antisense nucleotide
gatgttgtcgtgctc

SEQ ID NO: 1618 - DNA, 17 bp, Artificial Sequence
  Antisense nucleotide
tgagatgttgtcgtgct

SEQ ID NO: 1619 - DNA, 15 bp, Artificial Sequence
  Antisense nucleotide
tgagatgttgtcgtg

SEQ ID NO: 1620 - DNA, 15 bp, Artificial Sequence
  Antisense nucleotide
gccaatgagatgttg

SEQ ID NO: 1621 - DNA, 14 bp, Artificial Sequence
  Antisense nucleotide
ctgccaatgagatg

SEQ ID NO: 1622 - DNA, 14 bp, Artificial Sequence
  Antisense nucleotide
cacatgggcatcac

SEQ ID NO: 1623 - DNA, 14 bp, Artificial Sequence
  Antisense nucleotide
tgtccacatgggca

SEQ ID NO: 1624 - DNA, 14 bp, Artificial Sequence
  Antisense nucleotide
gtactgtccacatg

SEQ ID NO: 1625 - DNA, 14 bp, Artificial Sequence
  Antisense nucleotide
cagctgctatatgc

SEQ ID NO: 1626 - DNA, 14 bp, Artificial Sequence
  Antisense nucleotide
gttctccaccaggg

SEQ ID NO: 1627 - DNA, 14 bp, Artificial Sequence
  Antisense nucleotide
agttctccaccagg

SEQ ID NO: 1628 - DNA, 16 bp, Artificial Sequence
  Antisense nucleotide
caaagttctccaccag

SEQ ID NO: 1629 - DNA, 16 bp, Artificial Sequence
  Antisense nucleotide
ccaagagtcatccagg

SEQ ID NO: 1630 - DNA, 14 bp, Artificial Sequence
  Antisense nucleotide
cccaagagtcatcc

SEQ ID NO: 1631 - DNA, 16 bp, Artificial Sequence
  Antisense nucleotide
cctgcattttcccaag

SEQ ID NO: 1632 - DNA, 14 bp, Artificial Sequence
  Antisense nucleotide
tcctgcattttccc

SEQ ID NO: 1633 - DNA, 15 bp, Artificial Sequence
  Antisense nucleotide
gccatatctagaggc

SEQ ID NO: 1634 - DNA, 14 bp, Artificial Sequence
  Antisense nucleotide
tcacatcttcagcc

SEQ ID NO: 1635 - DNA, 16 bp, Artificial Sequence
  Antisense nucleotide
gcttcacatcttcagc

SEQ ID NO: 1636 - DNA, 15 bp, Artificial Sequence
  Antisense nucleotide
cagcttcacatcttc

SEQ ID NO: 1637 - DNA, 17 bp, Artificial Sequence
  Antisense nucleotide
gtaacttatacagctgc

SEQ ID NO: 1638 - DNA, 15 bp, Artificial Sequence
  Antisense nucleotide
ccagtttttgtctgg

SEQ ID NO: 1639 - DNA, 14 bp, Artificial Sequence
  Antisense nucleotide
ccatttgtctcagg

SEQ ID NO: 1640 - DNA, 14 bp, Artificial Sequence
  Antisense nucleotide
gtgtagcccatttg

SEQ ID NO: 1641 - DNA, 14 bp, Artificial Sequence
  Antisense nucleotide
gcttcggtgtagcc

SEQ ID NO: 1642 - DNA, 18 bp, Artificial Sequence
  Antisense nucleotide
gatcacttcaattgcttc

SEQ ID NO: 1643 - DNA, 14 bp, Artificial Sequence
  Antisense nucleotide
cttgtggaggcagg

SEQ ID NO: 1644 - DNA, 14 bp, Artificial Sequence
  Antisense nucleotide
gctgccttgtggag

SEQ ID NO: 1645 - DNA, 18 bp, Artificial Sequence
  Antisense nucleotide
ctatttgctgccttgtgg

SEQ ID NO: 1646 - DNA, 14 bp, Artificial Sequence
  Antisense nucleotide
ggatgtctccacgc

SEQ ID NO: 1647 - DNA, 14 bp, Artificial Sequence
  Antisense nucleotide
ggaaggatgtctcc

SEQ ID NO: 1648 - DNA, 14 bp, Artificial Sequence
  Antisense nucleotide
tgcggaaggatgtc

SEQ ID NO: 1649 - DNA, 17 bp, Artificial Sequence
  Antisense nucleotide
gtttgcggaaggatgtc

SEQ ID NO: 1650 - DNA, 14 bp, Artificial Sequence
  Antisense nucleotide
gctgagtttgcgga

SEQ ID NO: 1651 - DNA, 16 bp, Artificial Sequence
  Antisense nucleotide
ggtaaagctgagtttg

SEQ ID NO: 1652 - DNA, 14 bp, Artificial Sequence
  Antisense nucleotide
tcggtaaagctgag

SEQ ID NO: 1653 - DNA, 15 bp, Artificial Sequence
  Antisense nucleotide
gactcggtaaagctg

SEQ ID NO: 1654 - DNA, 16 bp, Artificial Sequence
  Antisense nucleotide
agagactcggtaaagc

SEQ ID NO: 1655 - DNA, 16 bp, Artificial Sequence
  Antisense nucleotide
gaaattgtcagcaggc

SEQ ID NO: 1656 - DNA, 15 bp, Artificial Sequence
  Antisense nucleotide
gaaattgtcagcagg

SEQ ID NO: 1657 - DNA, 16 bp, Artificial Sequence
  Antisense nucleotide
ggaaattgtcagcagg

SEQ ID NO: 1658 - DNA, 15 bp, Artificial Sequence
  Antisense nucleotide
ggaaattgtcagcag

SEQ ID NO: 1659 - DNA, 14 bp, Artificial Sequence
  Antisense nucleotide
gggaaattgtcagc

SEQ ID NO: 1660 - DNA, 15 bp, Artificial Sequence
  Antisense nucleotide
gtgtgggaaattgtc

SEQ ID NO: 1661 - DNA, 15 bp, Artificial Sequence
  Antisense nucleotide
ggtttacacggtgtg

SEQ ID NO: 1662 - DNA, 15 bp, Artificial Sequence
  Antisense nucleotide
gctttggtttacacg

SEQ ID NO: 1663 - DNA, 15 bp, Artificial Sequence
  Antisense nucleotide
gcacctttgggatgc

SEQ ID NO: 1664 - DNA, 15 bp, Artificial Sequence
  Antisense nucleotide
ccaggttctgcttcc

SEQ ID NO: 1665 - DNA, 15 bp, Artificial Sequence
  Antisense nucleotide
gctctgtctagtggc

SEQ ID NO: 1666 - DNA, 14 bp, Artificial Sequence
  Antisense nucleotide
actctccatgtctc

SEQ ID NO: 1667 - DNA, 16 bp, Artificial Sequence
  Antisense nucleotide
caactctccatgtctc

SEQ ID NO: 1668 - DNA, 14 bp, Artificial Sequence
  Antisense nucleotide
caactctccatgtc

SEQ ID NO: 1669 - DNA, 14 bp, Artificial Sequence
  Antisense nucleotide
agcaactctccatg

SEQ ID NO: 1670 - DNA, 16 bp, Artificial Sequence
  Antisense nucleotide
gtagcaactctccatg

SEQ ID NO: 1671 - DNA, 14 bp, Artificial Sequence
  Antisense nucleotide
gtagcaactctcca

SEQ ID NO: 1672 - DNA, 17 bp, Artificial Sequence
  Antisense nucleotide
ggttgtagcaactctcc

SEQ ID NO: 1673 - DNA, 14 bp, Artificial Sequence
  Antisense nucleotide
cgggcagtcctcca

SEQ ID NO: 1674 - DNA, 13 bp, Artificial Sequence
  Antisense nucleotide
gcaccgggcagtc

SEQ ID NO: 1675 - DNA, 13 bp, Artificial Sequence
  Antisense nucleotide
aggcaccgggcag

SEQ ID NO: 1676 - DNA, 15 bp, Artificial Sequence
  Antisense nucleotide
gtgtgttaccaggtc

SEQ ID NO: 1677 - DNA, 15 bp, Artificial Sequence
  Antisense nucleotide
tgtgtgttaccaggt

SEQ ID NO: 1678 - DNA, 14 bp, Artificial Sequence
  Antisense nucleotide
tgggtcactgtgtg

SEQ ID NO: 1679 - DNA, 15 bp, Artificial Sequence
  Antisense nucleotide
cagactgtgggcatg

SEQ ID NO: 1680 - DNA, 16 bp, Artificial Sequence
  Antisense nucleotide
cccaccagactgtggg

SEQ ID NO: 1681 - DNA, 14 bp, Artificial Sequence
  Antisense nucleotide
ccaccagactgtgg

SEQ ID NO: 1682 - DNA, 14 bp, Artificial Sequence
  Antisense nucleotide
tgcccaccagactg

SEQ ID NO: 1683 - DNA, 13 bp, Artificial Sequence
  Antisense nucleotide
cggcttcctcccc

SEQ ID NO: 1684 - DNA, 14 bp, Artificial Sequence
  Antisense nucleotide
ccttgtcttccacc

SEQ ID NO: 1685 - DNA, 14 bp, Artificial Sequence
  Antisense nucleotide
accgaggctgccac

SEQ ID NO: 1686 - DNA, 14 bp, Artificial Sequence
  Antisense nucleotide
ggaagaaaccgagg

SEQ ID NO: 1687 - DNA, 14 bp, Artificial Sequence
  Antisense nucleotide
gggaagaaaccgag

SEQ ID NO: 1688 - DNA, 13 bp, Artificial Sequence
  Antisense nucleotide
ggccatctgcgcc

SEQ ID NO: 1689 - DNA, 13 bp, Artificial Sequence
  Antisense nucleotide
gcggccatctgcg

SEQ ID NO: 1690 - DNA, 14 bp, Artificial Sequence
  Antisense nucleotide
gtggcggccatctg

SEQ ID NO: 1691 - DNA, 14 bp, Artificial Sequence
  Antisense nucleotide
accgtggcggccat

SEQ ID NO: 1692 - DNA, 17 bp, Artificial Sequence
  Antisense nucleotide
gccgctcaatcttcatc

SEQ ID NO: 1693 - DNA, 17 bp, Artificial Sequence
  Antisense nucleotide
cttcatcttgtgatagg

SEQ ID NO: 1694 - DNA, 17 bp, Artificial Sequence
  Antisense nucleotide
gctcaatcttcatcttg

SEQ ID NO: 1695 - DNA, 17 bp, Artificial Sequence
  Antisense nucleotide
cagaaacactgttacag

SEQ ID NO: 1696 - DNA, 17 bp, Artificial Sequence
  Antisense nucleotide
cagttgcagaaacactg

SEQ ID NO: 1697 - DNA, 17 bp, Artificial Sequence
  Antisense nucleotide
gtttcagttgcagaaac

SEQ ID NO: 1698 - DNA, 14 bp, Artificial Sequence
  Antisense nucleotide
cttccaccagaggg

SEQ ID NO: 1699 - DNA, 14 bp, Artificial Sequence
  Antisense nucleotide
gtcttccaccagag

SEQ ID NO: 1700 - DNA, 17 bp, Artificial Sequence
  Antisense nucleotide
cttgtcttccaccagag

SEQ ID NO: 1701 - DNA, 14 bp, Artificial Sequence
  Antisense nucleotide
tccttgtcttccac

SEQ ID NO: 1702 - DNA, 16 bp, Artificial Sequence
  Antisense nucleotide
cttccttgtcttccac

SEQ ID NO: 1703 - DNA, 15 bp, Artificial Sequence
  Antisense nucleotide
catcttgtgataggg

SEQ ID NO: 1704 - DNA, 15 bp, Artificial Sequence
  Antisense nucleotide
gctaggtgcagtggt

SEQ ID NO: 1705 - DNA, 14 bp, Artificial Sequence
  Antisense nucleotide
gatggctaggtgca

SEQ ID NO: 1706 - DNA, 15 bp, Artificial Sequence
  Antisense nucleotide
gtggatgatggctag

SEQ ID NO: 1707 - DNA, 14 bp, Artificial Sequence
  Antisense nucleotide
cccgtggatgatgg

SEQ ID NO: 1708 - DNA, 14 bp, Artificial Sequence
  Antisense nucleotide
ctgcccgtggatga

SEQ ID NO: 1709 - DNA, 14 bp, Artificial Sequence
  Antisense nucleotide
agagcctccaccca

SEQ ID NO: 1710 - DNA, 15 bp, Artificial Sequence
  Antisense nucleotide
gttgtactctcgagc

SEQ ID NO: 1711 - DNA, 13 bp, Artificial Sequence
  Antisense nucleotide
cgttgtactctcg

SEQ ID NO: 1712 - DNA, 14 bp, Artificial Sequence
  Antisense nucleotide
cgcgttgtactctc

SEQ ID NO: 1713 - DNA, 14 bp, Artificial
  Antisense nucleotide
gagtctccatgccg

SEQ ID NO: 1714 - DNA, 14 bp, Artificial
  Antisense nucleotide
ctgagtctccatgc

SEQ ID NO: 1715 - DNA, 14 bp, Artificial
  Antisense nucleotide
catggctgagtctc

SEQ ID NO: 1716 - DNA, 14 bp, Artificial
  Antisense nucleotide
tgcatggctgagtc

SEQ ID NO: 1717 - DNA, 14 bp, Artificial Sequence
  Antisense nucleotide
gcgttcacgttggc

SEQ ID NO: 1718 - DNA, 14 bp, Artificial Sequence
  Antisense nucleotide
gtgcgagcgttcac

SEQ ID NO: 1719 - DNA, 14 bp, Artificial Sequence
  Antisense nucleotide
aggtgcgagcgttc

SEQ ID NO: 1720 - DNA, 14 bp, Artificial Sequence
  Antisense nucleotide
gcaaaggtgcgagc

SEQ ID NO: 1721 - DNA, 14 bp, Artificial Sequence
  Antisense nucleotide
cctggtggctcagg

SEQ ID NO: 1722 - DNA, 14 bp, Artificial Sequence
  Antisense nucleotide
gtcagtcacctgag

SEQ ID NO: 1723 - DNA, 15 bp, Artificial Sequence
  Antisense nucleotide
caggtcagtcacctg

SEQ ID NO: 1724 - DNA, 15 bp, Artificial Sequence
  Antisense nucleotide
cagcaggtcagtcac

SEQ ID NO: 1725 - DNA, 14 bp, Artificial Sequence
  Antisense nucleotide
gcagcaggtcagtc

SEQ ID NO: 1726 - DNA, 17 bp, Artificial Sequence
  Antisense nucleotide
catttagcagcaaggtc

SEQ ID NO: 1727 - DNA, 15 bp, Artificial Sequence
  Antisense nucleotide
gcagcatttagcagc

SEQ ID NO: 1728 - DNA, 15 bp, Artificial Sequence
  Antisense nucleotide
ctgagcagcatttag

SEQ ID NO: 1729 - DNA, 14 bp, Artificial Sequence
  Antisense nucleotide
cccatgagaatcct

SEQ ID NO: 1730 - DNA, 17 bp, Artificial Sequence
  Antisense nucleotide
ccttcccatgagaatcc

SEQ ID NO: 1731 - DNA, 14 bp, Artificial Sequence
  Antisense nucleotide
tcctccccttccca

SEQ ID NO: 1732 - DNA, 14 bp, Artificial Sequence
  Antisense nucleotide
gcctccagtagacc

SEQ ID NO: 1733 - DNA, 14 bp, Artificial Sequence
  Antisense nucleotide
gtcagacagggcct

SEQ ID NO: 1734 - DNA, 14 bp, Artificial Sequence
  Antisense nucleotide
ccatgtcagacagg

SEQ ID NO: 1735 - DNA, 14 bp, Artificial Sequence
  Antisense nucleotide
ggcccatgtcagac

SEQ ID NO: 1736 - DNA, 17 bp, Artificial Sequence
  Antisense nucleotide
gctattcctgaaatcac

SEQ ID NO: 1737 - DNA, 17 bp, Artificial Sequence
  Antisense nucleotide
cctcttgtcttcttacc

SEQ ID NO: 1738 - DNA, 17 bp, Artificial Sequence
  Antisense nucleotide
ggagaagaaacctcttg

SEQ ID NO: 1739 - DNA, 17 bp, Artificial Sequence
  Antisense nucleotide
ccttgctgaagtttctt

SEQ ID NO: 1740 - DNA, 14 bp, Artificial Sequence
  Antisense nucleotide
ccaagactccttgc

SEQ ID NO: 1741 - DNA, 14 bp, Artificial Sequence
  Antisense nucleotide
ccctttcatggagc

SEQ ID NO: 1742 - DNA, 14 bp, Artificial Sequence
  Antisense nucleotide
cctcttggtgtgac

SEQ ID NO: 1743 - DNA, 14 bp, Artificial Sequence
  Antisense nucleotide
gactaaggatgccg

SEQ ID NO: 1744 - DNA, 15 bp, Artificial Sequence
  Antisense nucleotide
gtggcaggactaagg

SEQ ID NO: 1745 - DNA, 14 bp, Artificial Sequence
  Antisense nucleotide
agacgtggcaggac

SEQ ID NO: 1746 - DNA, 14 bp, Artificial Sequence
  Antisense nucleotide
cttccagcaggcag

SEQ ID NO: 1747 - DNA, 14 bp, Artificial Sequence
  Antisense nucleotide
gttcctctgcctgg

SEQ ID NO: 1748 - DNA, 16 bp, Artificial Sequence
  Antisense nucleotide
gatgttcctctgcctg

SEQ ID NO: 1749 - DNA, 16 bp, Artificial Sequence
  Antisense nucleotide
gagatgttcctctgcc

SEQ ID NO: 1750 - DNA, 16 bp, Artificial Sequence
  Antisense nucleotide
gtgagatgttcctctg

SEQ ID NO: 1751 - DNA, 18 bp, Artificial Sequence
  Antisense nucleotide
cagagagtgagatgttcc

SEQ ID NO: 1752 - DNA, 18 bp, Artificial Sequence
  Antisense nucleotide
ccagagagtgagatgttc

SEQ ID NO: 1753 - DNA, 15 bp, Artificial Sequence
  Antisense nucleotide
ggtccagagagtgag

SEQ ID NO: 1754 - DNA, 15 bp, Artificial Sequence
  Antisense nucleotide
gaggtccagagagtg

SEQ ID NO: 1755 - DNA, 14 bp, Artificial Sequence
  Antisense nucleotide
ggtcctgtagtgcc

SEQ ID NO: 1756 - DNA, 17 bp, Artificial Sequence
  Antisense nucleotide
gattttatgatgcaggc

SEQ ID NO: 1757 - DNA, 18 bp, Artificial Sequence
  Antisense nucleotide
gacctgcatcccttattg

SEQ ID NO: 1758 - DNA, 18 bp, Artificial Sequence
  Antisense nucleotide
tagttgattttccagcag

SEQ ID NO: 1759 - DNA, 16 bp, Artificial Sequence
  Antisense nucleotide
gaatctcacgttttgc

SEQ ID NO: 1760 - DNA, 18 bp, Artificial Sequence
  Antisense nucleotide
cagagaaagaatctcacg

SEQ ID NO: 1761 - DNA, 18 bp, Artificial Sequence
  Antisense nucleotide
tttcaccatcagagaaag

SEQ ID NO: 1762 - DNA, 17 bp, Artificial Sequence
  Antisense nucleotide
catttggacatttcacc

SEQ ID NO: 1763 - DNA, 18 bp, Artificial Sequence
  Antisense nucleotide
ccttcatttggacatttc

SEQ ID NO: 1764 - DNA, 18 bp, Artificial Sequence
  Antisense nucleotide
caatgtgcttgatgatcc

SEQ ID NO: 1765 - DNA, 15 bp, Artificial Sequence
  Antisense nucleotide
cgcatcggatttctc

SEQ ID NO: 1766 - DNA, 18 bp, Artificial Sequence
  Antisense nucleotide
caaaccgcatcggatttc

SEQ ID NO: 1767 - DNA, 14 bp, Artificial Sequence
  Antisense nucleotide
gaactgcaaaccgc

SEQ ID NO: 1768 - DNA, 15 bp, Artificial Sequence
  Antisense nucleotide
gcagagaagaactgc

SEQ ID NO: 1769 - DNA, 15 bp, Artificial Sequence
  Antisense nucleotide
gcaagtaaacatggg

SEQ ID NO: 1770 - DNA, 14 bp, Artificial Sequence
  Antisense nucleotide
ggtccacgttttgg

SEQ ID NO: 1771 - DNA, 16 bp, Artificial Sequence
  Antisense nucleotide
gcaagggtccacgttt

SEQ ID NO: 1772 - DNA, 17 bp, Artificial Sequence
  Antisense nucleotide
tggcttcttcttcaggg

SEQ ID NO: 1773 - DNA, 16 bp, Artificial Sequence
  Antisense nucleotide
tcctgctggcttcttc

SEQ ID NO: 1774 - DNA, 14 bp, Artificial Sequence
  Antisense nucleotide
gtcctgctggcttc

SEQ ID NO: 1775 - DNA, 17 bp, Artificial Sequence
  Antisense nucleotide
ggtagtctaggaattgg

SEQ ID NO: 1776 - DNA, 17 bp, Artificial Sequence
  Antisense nucleotide
cttgcaggtagtctagg

SEQ ID NO: 1777 - DNA, 17 bp, Artificial Sequence
  Antisense nucleotide
gaaactcttgcaggtag

SEQ ID NO: 1778 - DNA, 17 bp, Artificial Sequence
  Antisense nucleotide
caccaagaaactcttgc

SEQ ID NO: 1779 - DNA, 18 bp, Artificial Sequence
  Antisense nucleotide
cattacaccaagaaactc

SEQ ID NO: 1780 - DNA, 18 bp, Artificial Sequence
  Antisense nucleotide
ctcggtgttcattacacc

SEQ ID NO: 1781 - DNA, 18 bp, Artificial Sequence
  Antisense nucleotide
ctttctattatccactcg

SEQ ID NO: 1782 - DNA, 18 bp, Artificial Sequence
  Antisense nucleotide
ccagtttagtctcaactt

SEQ ID NO: 1783 - DNA, 18 bp, Artificial Sequence
  Antisense nucleotide
aaccagtttagtctcaac

SEQ ID NO: 1784 - DNA, 18 bp, Artificial Sequence
  Antisense nucleotide
acaaaccagtttagtctc

SEQ ID NO: 1785 - DNA, 18 bp, Artificial Sequence
  Antisense nucleotide
ctcgcgaaaaagtttctt

SEQ ID NO: 1786 - DNA, 18 bp, Artificial Sequence
  Antisense nucleotide
ccctcgcgaaaaagtttc

SEQ ID NO: 1787 - DNA, 16 bp, Artificial Sequence
  Antisense nucleotide
gtccctcgcgaaaaag

SEQ ID NO: 1788 - DNA, 15 bp, Artificial Sequence
  Antisense nucleotide
cagttgaaccgtccc

SEQ ID NO: 1789 - DNA, 18 bp, Artificial Sequence
  Antisense nucleotide
gctttcgaagtttcagtt

SEQ ID NO: 1790 - DNA, 17 bp, Artificial Sequence
  Antisense nucleotide
gatgctttcgaagtttc

SEQ ID NO: 1791 - DNA, 18 bp, Artificial Sequence
  Antisense nucleotide
ctgtctctgcaaataatg

SEQ ID NO: 1792 - DNA, 18 bp, Artificial Sequence
  Antisense nucleotide
cacttattacattcaccc

SEQ ID NO: 1793 - DNA, 17 bp, Artificial
  Antisense nucleotide
ttttcctccagttcctc

SEQ ID NO: 1794 - DNA, 20 bp, Artificial Sequence
  Antisense nucleotide
ggacaatatgtacaaaactc

SEQ ID NO: 1795 - DNA, 18 bp, Artificial Sequence
  Antisense nucleotide
gttgatgaacatttggac

SEQ ID NO: 1796 - DNA, 18 bp, Artificial Sequence
  Antisense nucleotide
gtgttgatgaacatttgg

SEQ ID NO: 1797 - DNA, 16 bp, Artificial Sequence
  Antisense nucleotide
caaaatttggccaggg

SEQ ID NO: 1798 - DNA, 15 bp, Artificial Sequence
  Antisense nucleotide
gcccaaaatttggcc

SEQ ID NO: 1799 - DNA, 17 bp, Artificial Sequence
  Antisense nucleotide
cccagcccaaaatttgg

SEQ ID NO: 1800 - DNA, 17 bp, Artificial Sequence
  Antisense nucleotide
gtccccagcccaaaatt

SEQ ID NO: 1801 - DNA, 16 bp, Artificial Sequence
  Antisense nucleotide
aaatcgccagaggctg

SEQ ID NO: 1802 - DNA, 16 bp, Artificial Sequence
  Antisense nucleotide
accaaatcgccagagg

SEQ ID NO: 1803 - DNA, 17 bp, Artificial Sequence
  Antisense nucleotide
catcaccaaatcgccag

SEQ ID NO: 1804 - DNA, 16 bp, Artificial Sequence
  Antisense nucleotide
taggagtggttgaggc

SEQ ID NO: 1805 - DNA, 17 bp, Artificial Sequence
  Antisense nucleotide
gtgtaggagtggttgag

SEQ ID NO: 1806 - DNA, 14 bp, Artificial Sequence
  Antisense nucleotide
ctgtgtaggagtgg

SEQ ID NO: 1807 - DNA, 14 bp, Artificial Sequence
  Antisense nucleotide
cccacatgcctgtg

SEQ ID NO: 1808 - DNA, 14 bp, Artificial Sequence
  Antisense nucleotide
cgatgaacaacgag

SEQ ID NO: 1809 - DNA, 16 bp, Artificial Sequence
  Antisense nucleotide
ctggcgatgaacaacg

SEQ ID NO: 1810 - DNA, 14 bp, Artificial Sequence
  Antisense nucleotide
cgctggcgatgaac

SEQ ID NO: 1811 - DNA, 15 bp, Artificial Sequence
  Antisense nucleotide
gagctagtcccgttg

SEQ ID NO: 1812 - DNA, 15 bp, Artificial Sequence
  Antisense nucleotide
gcgaagagctagtcc

SEQ ID NO: 1813 - DNA, 17 bp, Artificial Sequence
  Antisense nucleotide
ccagttatgcgaagagc

SEQ ID NO: 1814 - DNA, 16 bp, Artificial Sequence
  Antisense nucleotide
ccccagttatgcgaag

SEQ ID NO: 1815 - DNA, 14 bp, Artificial Sequence
  Antisense nucleotide
cacatgcttggcgc

SEQ ID NO: 1816 - DNA, 16 bp, Artificial Sequence
  Antisense nucleotide
gatcacatgcttggcg

SEQ ID NO: 1817 - DNA, 18 bp, Artificial Sequence
  Antisense nucleotide
gacaaagagcatgatcac

SEQ ID NO: 1818 - DNA, 17 bp, Artificial Sequence
  Antisense nucleotide
gagtcacagggacaaag

SEQ ID NO: 1819 - DNA, 15 bp, Artificial Sequence
  Antisense nucleotide
gagagtcacagggac

SEQ ID NO: 1820 - DNA, 15 bp, Artificial Sequence
  Antisense nucleotide
gcagagagtcacagg

SEQ ID NO: 1821 - DNA, 14 bp, Artificial Sequence
  Antisense nucleotide
ccatgcagagagtc

SEQ ID NO: 1822 - DNA, 15 bp, Artificial Sequence
  Antisense nucleotide
ccaccatgcagagag

SEQ ID NO: 1823 - DNA, 14 bp, Artificial Sequence
  Antisense nucleotide
tagccacgaccacc

SEQ ID NO: 1824 - DNA, 18 bp, Artificial Sequence
  Antisense nucleotide
gattagctgcccatcctt

SEQ ID NO: 1825 - DNA, 17 bp, Artificial Sequence
  Antisense nucleotide
ggtatagattagctgcc

SEQ ID NO: 1826 - DNA, 18 bp, Artificial Sequence
  Antisense nucleotide
gtatcttctgtgaatggg

SEQ ID NO: 1827 - DNA, 14 bp, Artificial Sequence
  Antisense nucleotide
ctggcccacagtct

SEQ ID NO: 1828 - DNA, 14 bp, Artificial Sequence
  Antisense nucleotide
ctctggcccacagt

SEQ ID NO: 1829 - DNA, 14 bp, Artificial Sequence
  Antisense nucleotide
tgcagggctctctg

SEQ ID NO: 1830 - DNA, 14 bp, Artificial Sequence
  Antisense nucleotide
agtgcagggctctc

SEQ ID NO: 1831 - DNA, 16 bp, Artificial Sequence
  Antisense nucleotide
cactgatcatgatggc

SEQ ID NO: 1832 - DNA, 18 bp, Artificial Sequence
  Antisense nucleotide
gacactgatcatgatggc

SEQ ID NO: 1833 - DNA, 18 bp, Artificial Sequence
  Antisense nucleotide
acaatgacactgatcatg

SEQ ID NO: 1834 - DNA, 16 bp, Artificial Sequence
  Antisense nucleotide
gaaccaccaggaggat

SEQ ID NO: 1835 - DNA, 17 bp, Artificial Sequence
  Antisense nucleotide
gacacaaaacagccact

SEQ ID NO: 1836 - DNA, 15 bp, Artificial Sequence
  Antisense nucleotide
gtggacctttcggac

SEQ ID NO: 1837 - DNA, 17 bp, Artificial Sequence
  Antisense nucleotide
caaccagcatacgaagt

SEQ ID NO: 1838 - DNA, 14 bp, Artificial Sequence
  Antisense nucleotide
tccctctgggcttc

SEQ ID NO: 1839 - DNA, 14 bp, Artificial Sequence
  Antisense nucleotide
actgtccctctggg

SEQ ID NO: 1840 - DNA, 14 bp, Artificial Sequence
  Antisense nucleotide
gactgtccctctgg

SEQ ID NO: 1841 - DNA, 16 bp, Artificial Sequence
  Antisense nucleotide
cctagatgactgtccc

SEQ ID NO: 1842 - DNA, 15 bp, Artificial Sequence
  Antisense nucleotide
cagcgaggatactgc

SEQ ID NO: 1843 - DNA, 16 bp, Artificial Sequence
  Antisense nucleotide
cttcaccagcgaggat

SEQ ID NO: 1844 - DNA, 18 bp, Artificial Sequence
  Antisense nucleotide
tttcctctgggtcttcac

SEQ ID NO: 1845 - DNA, 17 bp, Artificial Sequence
  Antisense nucleotide
ctttcctctgggtcttc

SEQ ID NO: 1846 - DNA, 17 bp, Artificial Sequence
  Antisense nucleotide
ctcccaatccaagtttt

SEQ ID NO: 1847 - DNA, 14 bp, Artificial Sequence
  Antisense nucleotide
ttcatcccggagcc

SEQ ID NO: 1848 - DNA, 16 bp, Artificial Sequence
  Antisense nucleotide
ttcttcatcccggagc

SEQ ID NO: 1849 - DNA, 16 bp, Artificial Sequence
  Antisense nucleotide
gctcagccagttcttc

SEQ ID NO: 1850 - DNA, 14 bp, Artificial Sequence
  Antisense nucleotide
gacagagagggcac

SEQ ID NO: 1851 - DNA, 15 bp, Artificial Sequence
  Antisense nucleotide
cttcacctccgacag

SEQ ID NO: 1852 - DNA, 16 bp, Artificial Sequence
  Antisense nucleotide
gaaaagtctgggcagg

SEQ ID NO: 1853 - DNA, 18 bp, Artificial Sequence
  Antisense nucleotide
gaccctggaacagaaaag

SEQ ID NO: 1854 - DNA, 15 bp, Artificial Sequence
  Antisense nucleotide
ctgaccctggaacag

SEQ ID NO: 1855 - DNA, 16 bp, Artificial Sequence
  Antisense nucleotide
actacaggctgaccct

SEQ ID NO: 1856 - DNA, 18 bp, Artificial Sequence
  Antisense nucleotide
attcactacaggctgacc

SEQ ID NO: 1857 - DNA, 14 bp, Artificial Sequence
  Antisense nucleotide
cgattcactacagg

SEQ ID NO: 1858 - DNA, 14 bp, Artificial Sequence
  Antisense nucleotide
ggccgattcactac

SEQ ID NO: 1859 - DNA, 16 bp, Artificial Sequence
  Antisense nucleotide
cgaacgtctgttggtc

SEQ ID NO: 1860 - DNA, 15 bp, Artificial Sequence
  Antisense nucleotide
cgcgaacgtctgttg

SEQ ID NO: 1861 - DNA, 18 bp, Artificial Sequence
  Antisense nucleotide
cttctgtttgtcgaggat

SEQ ID NO: 1862 - DNA, 18 bp, Artificial Sequence
  Antisense nucleotide
ttcaccaccttctgtttg

SEQ ID NO: 1863 - DNA, 18 bp, Artificial Sequence
  Antisense nucleotide
aggatgcgcttttcattc

SEQ ID NO: 1864 - DNA, 15 bp, Artificial Sequence
  Antisense nucleotide
agcttgcaggatgcg

SEQ ID NO: 1865 - DNA, 18 bp, Artificial Sequence
  Antisense nucleotide
gttgacagcttgcaggat

SEQ ID NO: 1866 - DNA, 18 bp, Artificial Sequence
  Antisense nucleotide
ggaacggaaagttgacag

SEQ ID NO: 1867 - DNA, 18 bp, Artificial Sequence
  Antisense nucleotide
aactcgagtttgacgagg

SEQ ID NO: 1868 - DNA, 17 bp, Artificial Sequence
  Antisense nucleotide
tgtccttgaaggagaac

SEQ ID NO: 1869 - DNA, 18 bp, Artificial Sequence
  Antisense nucleotide
cgtactccatgaccatgt

SEQ ID NO: 1870 - DNA, 16 bp, Artificial Sequence
  Antisense nucleotide
gcacgtactccatgac

SEQ ID NO: 1871 - DNA, 16 bp, Artificial Sequence
  Antisense nucleotide
gattctccggcttcag

SEQ ID NO: 1872 - DNA, 18 bp, Artificial
  Antisense nucleotide
tcaatgagcagattctcc

SEQ ID NO: 1873 - DNA, 17 bp, Artificial Sequence
  Antisense nucleotide
ggtcaatgagcagattc

SEQ ID NO: 1874 - DNA, 15 bp, Artificial Sequence
  Antisense nucleotide
ccctgctggtcaatg

SEQ ID NO: 1875 - DNA, 14 bp, Artificial Sequence
  Antisense nucleotide
tagccctgctggtc

SEQ ID NO: 1876 - DNA, 14 bp, Artificial Sequence
  Antisense nucleotide
cgcttggcgaaacc

SEQ ID NO: 1877 - DNA, 14 bp, Artificial Sequence
  Antisense nucleotide
ccttcacgcgcttg

SEQ ID NO: 1878 - DNA, 14 bp, Artificial Sequence
  Antisense nucleotide
aaggtccaagtgcg

SEQ ID NO: 1879 - DNA, 14 bp, Artificial Sequence
  Antisense nucleotide
tgccgcacaaggtc

SEQ ID NO: 1880 - DNA, 17 bp, Artificial Sequence
  Antisense nucleotide
ggtgaggaccaccattt

SEQ ID NO: 1881 - DNA, 14 bp, Artificial Sequence
  Antisense nucleotide
gggtgtcacaggtg

SEQ ID NO: 1882 - DNA, 18 bp, Artificial Sequence
  Antisense nucleotide
ataccatcttcttcaggg

SEQ ID NO: 1883 - DNA, 18 bp, Artificial Sequence
  Antisense nucleotide
ggtgataccatcttcttc

SEQ ID NO: 1884 - DNA, 18 bp, Artificial Sequence
  Antisense nucleotide
ccaggtgataccatcttc

SEQ ID NO: 1885 - DNA, 15 bp, Artificial Sequence
  Antisense nucleotide
cctcactgctctggt

SEQ ID NO: 1886 - DNA, 14 bp, Artificial Sequence
  Antisense nucleotide
taagacctcactgc

SEQ ID NO: 1887 - DNA, 16 bp, Artificial Sequence
  Antisense nucleotide
cagagcctaagacctc

SEQ ID NO: 1888 - DNA, 15 bp, Artificial Sequence
  Antisense nucleotide
ccagagcctaagacc

SEQ ID NO: 1889 - DNA, 18 bp, Artificial Sequence
  Antisense nucleotide
tcttcctttttgtgaagc

SEQ ID NO: 1890 - DNA, 18 bp, Artificial Sequence
  Antisense nucleotide
gaccaaattccatcttcc

SEQ ID NO: 1891 - DNA, 18 bp, Artificial Sequence
  Antisense nucleotide
atcagtggaccaaattcc

SEQ ID NO: 1892 - DNA, 18 bp, Artificial Sequence
  Antisense nucleotide
ggttctttctggtccttt

SEQ ID NO: 1893 - DNA, 18 bp, Artificial Sequence
  Antisense nucleotide
tttttgggttctttctgg

SEQ ID NO: 1894 - DNA, 18 bp, Artificial Sequence
  Antisense nucleotide
ggtcttatttttgggttc

SEQ ID NO: 1895 - DNA, 17 bp, Artificial Sequence
  Antisense nucleotide
aatgggcagactctcct

SEQ ID NO: 1896 - DNA, 18 bp, Artificial Sequence
  Antisense nucleotide
tccaccatgacctcaatg

SEQ ID NO: 1897 - DNA, 16 bp, Artificial Sequence
  Antisense nucleotide
aacggcatccaccatg

SEQ ID NO: 1898 - DNA, 15 bp, Artificial Sequence
  Antisense nucleotide
gtgaacggcatccac

SEQ ID NO: 1899 - DNA, 18 bp, Artificial Sequence
  Antisense nucleotide
acttgagcttgtgaacgg

SEQ ID NO: 1900 - DNA, 18 bp, Artificial Sequence
  Antisense nucleotide
ttcatacttgagcttgtg

SEQ ID NO: 1901 - DNA, 18 bp, Artificial Sequence
  Antisense nucleotide
ctggtgtagttttcatac

SEQ ID NO: 1902 - DNA, 18 bp, Artificial Sequence
  Antisense nucleotide
agctgctggtgtagtttt

SEQ ID NO: 1903 - DNA, 14 bp, Artificial Sequence
  Antisense nucleotide
aggaggaccagggt

SEQ ID NO: 1904 - DNA, 14 bp, Artificial Sequence
  Antisense nucleotide
aggtggtccaggag

SEQ ID NO: 1905 - DNA, 18 bp, Artificial Sequence
  Antisense nucleotide
tttctggccaaactgagg

SEQ ID NO: 1906 - DNA, 14 bp, Artificial Sequence
  Antisense nucleotide
ggaggtttctggcc

SEQ ID NO: 1907 - DNA, 14 bp, Artificial Sequence
  Antisense nucleotide
tctggagtggccac

SEQ ID NO: 1908 - DNA, 18 bp, Artificial Sequence
  Antisense nucleotide
cttctggagcatgttgct

SEQ ID NO: 1909 - DNA, 15 bp, Artificial Sequence
  Antisense nucleotide
gccttctggagcatg

SEQ ID NO: 1910 - DNA, 17 bp, Artificial Sequence
  Antisense nucleotide
gtttgtctggccttctg

SEQ ID NO: 1911 - DNA, 18 bp, Artificial Sequence
  Antisense nucleotide
gagtttgtctggccttct

SEQ ID NO: 1912 - DNA, 18 bp, Artificial Sequence
  Antisense nucleotide
ctagagtttgtctggcct

SEQ ID NO: 1913 - DNA, 18 bp, Artificial Sequence
  Antisense nucleotide
gcaagggtaaaattctag

SEQ ID NO: 1914 - DNA, 18 bp, Artificial Sequence
  Antisense nucleotide
agtgcaagggtaaaattc

SEQ ID NO: 1915 - DNA, 15 bp, Artificial Sequence
  Antisense nucleotide
aaacaggcctccact

SEQ ID NO: 1916 - DNA, 18 bp, Artificial Sequence
  Antisense nucleotide
cttggttaattccaatgg

SEQ ID NO: 1917 - DNA, 18 bp, Artificial Sequence
  Antisense nucleotide
aggcaactcccattagtt

SEQ ID NO: 1918 - DNA, 18 bp, Artificial Sequence
  Antisense nucleotide
tactactaaggcacaggg

SEQ ID NO: 1919 - DNA, 18 bp, Artificial Sequence
  Antisense nucleotide
aatactactaaggcacag

SEQ ID NO: 1920 - DNA, 18 bp, Artificial Sequence
  Antisense nucleotide
gtacatcttcaagtcttc

SEQ ID NO: 1921 - DNA, 14 bp, Artificial Sequence
  Antisense nucleotide
ggagtggacatgat

SEQ ID NO: 1922 - DNA, 18 bp, Artificial Sequence
  Antisense nucleotide
aagaagatgaagcctttg

SEQ ID NO: 1923 - DNA, 18 bp, Artificial Sequence
  Antisense nucleotide
ccgtcttactcttcttgg

SEQ ID NO: 1924 - DNA, 17 bp, Artificial Sequence
  Antisense nucleotide
ccgatacaattccaagg

SEQ ID NO: 1925 - DNA, 15 bp, Artificial Sequence
  Antisense nucleotide
ccttttccttctgag

SEQ ID NO: 1926 - DNA, 14 bp, Artificial Sequence
  Antisense nucleotide
ctgttgcaagtacg

SEQ ID NO: 1927 - DNA, 14 bp, Artificial Sequence
  Antisense nucleotide
cagaagcagagggc

SEQ ID NO: 1928 - DNA, 15 bp, Artificial Sequence
  Antisense nucleotide
cctcagaagcagagg

SEQ ID NO: 1929 - DNA, 14 bp, Artificial Sequence
  Antisense nucleotide
ctcctcagaagcag

SEQ ID NO: 1930 - DNA, 14 bp, Artificial Sequence
  Antisense nucleotide
acaggctggtggca

SEQ ID NO: 1931 - DNA, 16 bp, Artificial Sequence
  Antisense nucleotide
ccactctcaaacaggc

SEQ ID NO: 1932 - DNA, 14 bp, Artificial Sequence
  Antisense nucleotide
acggtagccgaagc

SEQ ID NO: 1933 - DNA, 15 bp, Artificial Sequence
  Antisense nucleotide
gacggtagccgaagc

SEQ ID NO: 1934 - DNA, 14 bp, Artificial Sequence
  Antisense nucleotide
ggccagacggtagc

SEQ ID NO: 1935 - DNA, 18 bp, Artificial Sequence
  Antisense nucleotide
gtgtagggccagacggta

SEQ ID NO: 1936 - DNA, 18 bp, Artificial Sequence
  Antisense nucleotide
ccgaagccatttttcagg

SEQ ID NO: 1937 - DNA, 17 bp, Artificial Sequence
  Antisense nucleotide
ccccgaagccatttttc

SEQ ID NO: 1938 - DNA, 14 bp, Artificial Sequence
  Antisense nucleotide
ggttgatgtcgtcc

SEQ ID NO: 1939 - DNA, 15 bp, Artificial Sequence
  Antisense nucleotide
gcttgagacactcgc

SEQ ID NO: 1940 - DNA, 14 bp, Artificial Sequence
  Antisense nucleotide
ccggacccgtccat

SEQ ID NO: 1941 - DNA, 14 bp, Artificial Sequence
  Antisense nucleotide
gcttgctttactgc

SEQ ID NO: 1942 - DNA, 14 bp, Artificial Sequence
  Antisense nucleotide
ggttgctctgagac

SEQ ID NO: 1943 - DNA, 14 bp, Artificial Sequence
  Antisense nucleotide
gccacagtcatgcc

SEQ ID NO: 1944 - DNA, 14 bp, Artificial Sequence
  Antisense nucleotide
cgggcatgctggcg

SEQ ID NO: 1945 - DNA, 18 bp, Artificial Sequence
  Antisense nucleotide
gtgaagttcaggatgatc

SEQ ID NO: 1946 - DNA, 14 bp, Artificial Sequence
  Antisense nucleotide
ccagtgcctcatgg

SEQ ID NO: 1947 - DNA, 15 bp, Artificial Sequence
  Antisense nucleotide
cagtgttctccatgg

SEQ ID NO: 1948 - DNA, 15 bp, Artificial Sequence
  Antisense nucleotide
ctgtaccagaccgag

SEQ ID NO: 1949 - DNA, 15 bp, Artificial Sequence
  Antisense nucleotide
gcatactgtttcagc

SEQ ID NO: 1950 - DNA, 15 bp, Artificial Sequence
  Antisense nucleotide
gccatcagctccttg

SEQ ID NO: 1951 - DNA, 15 bp, Artificial Sequence
  Antisense nucleotide
ccacaccatagatgg

SEQ ID NO: 1952 - DNA, 15 bp, Artificial Sequence
  Antisense nucleotide
gctggagcagtttcc

SEQ ID NO: 1953 - DNA, 14 bp, Artificial Sequence
  Antisense nucleotide
ctcgcttctgctgc

SEQ ID NO: 1954 - DNA, 14 bp, Artificial Sequence
  Antisense nucleotide
accgtggcaaagcg

SEQ ID NO: 1955 - DNA, 14 bp, Artificial Sequence
  Antisense nucleotide
aggtgacaccgtgg

SEQ ID NO: 1956 - DNA, 16 bp, Artificial Sequence
  Antisense nucleotide
gacttgattccttcag

SEQ ID NO: 1957 - DNA, 17 bp, Artificial Sequence
  Antisense nucleotide
ggatttgacttgattcc

SEQ ID NO: 1958 - DNA, 14 bp, Artificial Sequence
  Antisense nucleotide
gctgctgttcatgg

SEQ ID NO: 1959 - DNA, 17 bp, Artificial Sequence
  Antisense nucleotide
ccgtttctttcagtagg

SEQ ID NO: 1960 - DNA, 14 bp, Artificial Sequence
  Antisense nucleotide
cttgaagtaggagc

SEQ ID NO: 1961 - DNA, 14 bp, Artificial Sequence
  Antisense nucleotide
cgctcctacatggc

SEQ ID NO: 1962 - DNA, 15 bp, Artificial Sequence
  Antisense nucleotide
gatgaggtacaggcc

SEQ ID NO: 1963 - DNA, 15 bp, Artificial Sequence
  Antisense nucleotide
gtagatgaggtacag

SEQ ID NO: 1964 - DNA, 15 bp, Artificial Sequence
  Antisense nucleotide
gagtagatgaggtac

SEQ ID NO: 1965 - DNA, 14 bp, Artificial Sequence
  Antisense nucleotide
cctgggagtagatg

SEQ ID NO: 1966 - DNA, 14 bp, Artificial Sequence
  Antisense nucleotide
ggacctgggagtag

SEQ ID NO: 1967 - DNA, 14 bp, Artificial Sequence
  Antisense nucleotide
acatgggtggaggg

SEQ ID NO: 1968 - DNA, 14 bp, Artificial Sequence
  Antisense nucleotide
gtgctcatggtgtc

SEQ ID NO: 1969 - DNA, 15 bp, Artificial Sequence
  Antisense nucleotide
ctttcagtgctcatg

SEQ ID NO: 1970 - DNA, 15 bp, Artificial Sequence
  Antisense nucleotide
tgctttcagtgctca

SEQ ID NO: 1971 - DNA, 15 bp, Artificial Sequence
  Antisense nucleotide
gatgatctgactgcc

SEQ ID NO: 1972 - DNA, 16 bp, Artificial Sequence
  Antisense nucleotide
gttcgagaagatgatc

SEQ ID NO: 1973 - DNA, 15 bp, Artificial Sequence
  Antisense nucleotide
gggttcgagaagatg

SEQ ID NO: 1974 - DNA, 16 bp, Artificial Sequence
  Antisense nucleotide
ggtttgctacaacatg

SEQ ID NO: 1975 - DNA, 15 bp, Artificial Sequence
  Antisense nucleotide
cagcttgagggtttg

SEQ ID NO: 1976 - DNA, 14 bp, Artificial Sequence
  Antisense nucleotide
tgcccctcagcttg

SEQ ID NO: 1977 - DNA, 15 bp, Artificial Sequence
  Antisense nucleotide
gacacacactatctc

SEQ ID NO: 1978 - DNA, 16 bp, Artificial Sequence
  Antisense nucleotide
gcagccatctttattc

SEQ ID NO: 1979 - DNA, 14 bp, Artificial Sequence
  Antisense nucleotide
gttcagcagccatc

SEQ ID NO: 1980 - DNA, 14 bp, Artificial Sequence
  Antisense nucleotide
tggttcagcagcca

SEQ ID NO: 1981 - DNA, 16 bp, Artificial Sequence
  Antisense nucleotide
ctactggttcagcagc

SEQ ID NO: 1982 - DNA, 14 bp, Artificial Sequence
  Antisense nucleotide
tctactggttcagc

SEQ ID NO: 1983 - DNA, 16 bp, Artificial Sequence
  Antisense nucleotide
gccacaaagttgatgc

SEQ ID NO: 1984 - DNA, 16 bp, Artificial Sequence
  Antisense nucleotide
cattgccacaaagttg

SEQ ID NO: 1985 - DNA, 16 bp, Artificial Sequence
  Antisense nucleotide
gagaacttggtcattc

SEQ ID NO: 1986 - DNA, 16 bp, Artificial Sequence
  Antisense nucleotide
ggtcaatgaagagaac

SEQ ID NO: 1987 - DNA, 14 bp, Artificial Sequence
  Antisense nucleotide
cgatttccttggtc

SEQ ID NO: 1988 - DNA, 15 bp, Artificial Sequence
  Antisense nucleotide
ccgatttccttggtc

SEQ ID NO: 1989 - DNA, 18 bp, Artificial Sequence
  Antisense nucleotide
caaatagaggccgatttc

SEQ ID NO: 1990 - DNA, 14 bp, Artificial Sequence
  Antisense nucleotide
caaatagaggccga

SEQ ID NO: 1991 - DNA, 14 bp, Artificial Sequence
  Antisense nucleotide
cctctaggctggct

SEQ ID NO: 1992 - DNA, 15 bp, Artificial Sequence
  Antisense nucleotide
catacctctaggctg

SEQ ID NO: 1993 - DNA, 14 bp, Artificial Sequence
  Antisense nucleotide
agccatacctctag

SEQ ID NO: 1994 - DNA, 15 bp, Artificial Sequence
  Antisense nucleotide
cagccatacctctag

SEQ ID NO: 1995 - DNA, 17 bp, Artificial Sequence
  Antisense nucleotide
cacagagatagttacag

SEQ ID NO: 1996 - DNA, 17 bp, Artificial Sequence
  Antisense nucleotide
gtcttcgttttgaacag

SEQ ID NO: 1997 - DNA, 18 bp, Artificial Sequence
  Antisense nucleotide
ctagtcttcgttttgaac

SEQ ID NO: 1998 - DNA, 18 bp, Artificial Sequence
  Antisense nucleotide
tagctagtcttcgttttg

SEQ ID NO: 1999 - DNA, 13 bp, Artificial Sequence
  Antisense nucleotide
gagccactgcgcc

SEQ ID NO: 2000 - DNA, 14 bp, Artificial Sequence
  Antisense nucleotide
cgtgagccactgcg

SEQ ID NO: 2001 - DNA, 15 bp, Artificial Sequence
  Antisense nucleotide
cgtaacgatcactgg

SEQ ID NO: 2002 - DNA, 15 bp, Artificial Sequence
  Antisense nucleotide
gcactcgtaacgatc

SEQ ID NO: 2003 - DNA, 14 bp, Artificial Sequence
  Antisense nucleotide
ggagcactcgtaac

SEQ ID NO: 2004 - DNA, 14 bp, Artificial Sequence
  Antisense nucleotide
catcatcctgaggt

SEQ ID NO: 2005 - DNA, 16 bp, Artificial Sequence
  Antisense nucleotide
cagtatcatcatcctg

SEQ ID NO: 2006 - DNA, 16 bp, Artificial Sequence
  Antisense nucleotide
ctcagtatcatcatcc

SEQ ID NO: 2007 - DNA, 18 bp, Artificial Sequence
  Antisense nucleotide
ctaaaagtatgtgccatc

SEQ ID NO: 2008 - DNA, 14 bp, Artificial Sequence
  Antisense nucleotide
cacatcgcctctct

SEQ ID NO: 2009 - DNA, 18 bp, Artificial Sequence
  Antisense nucleotide
gcttcacagtcacatcgc

SEQ ID NO: 2010 - DNA, 16 bp, Artificial Sequence
  Antisense nucleotide
ggaaggcttcacagtc

SEQ ID NO: 2011 - DNA, 18 bp, Artificial Sequence
  Antisense nucleotide
cctgtgacttgagaattg

SEQ ID NO: 2012 - DNA, 14 bp, Artificial Sequence
  Antisense nucleotide
ggaagacctgtgac

SEQ ID NO: 2013 - DNA, 18 bp, Artificial Sequence
  Antisense nucleotide
ctctgctccacatatttg

SEQ ID NO: 2014 - DNA, 15 bp, Artificial Sequence
  Antisense nucleotide
caacgaagatctctg

SEQ ID NO: 2015 - DNA, 14 bp, Artificial Sequence
  Antisense nucleotide
caacaccaacgaag

SEQ ID NO: 2016 - DNA, 14 bp, Artificial Sequence
  Antisense nucleotide
ggtcttctgtttgc

SEQ ID NO: 2017 - DNA, 18 bp, Artificial Sequence
  Antisense nucleotide
cgatgaagtggtaggaag

SEQ ID NO: 2018 - DNA, 14 bp, Artificial Sequence
  Antisense nucleotide
ggttgcatggaagc

SEQ ID NO: 2019 - DNA, 15 bp, Artificial Sequence
  Antisense nucleotide
ggtcacaaacttgcc

SEQ ID NO: 2020 - DNA, 17 bp, Artificial Sequence
  Antisense nucleotide
ctgatttggtccactag

SEQ ID NO: 2021 - DNA, 16 bp, Artificial Sequence
  Antisense nucleotide
catgttagcactgttc

SEQ ID NO: 2022 - DNA, 16 bp, Artificial Sequence
  Antisense nucleotide
ggtcttgatgtactcc

SEQ ID NO: 2023 - DNA, 17 bp, Artificial Sequence
  Antisense nucleotide
ccacctaaagagagatc

SEQ ID NO: 2024 - DNA, 16 bp, Artificial Sequence
  Antisense nucleotide
cttgtactgcaccatc

SEQ ID NO: 2025 - DNA, 16 bp, Artificial Sequence
  Antisense nucleotide
gccagttaagaagatg

SEQ ID NO: 2026 - DNA, 17 bp, Artificial Sequence
  Antisense nucleotide
gagatcatgatccatgg

SEQ ID NO: 2027 - DNA, 17 bp, Artificial Sequence
  Antisense nucleotide
gtagtgtcccaatagtg

SEQ ID NO: 2028 - DNA, 16 bp, Artificial Sequence
  Antisense nucleotide
cttcctcatcattccc

SEQ ID NO: 2029 - DNA, 15 bp, Artificial Sequence
  Antisense nucleotide
cacaagcttttcgac

SEQ ID NO: 2030 - DNA, 18 bp, Artificial Sequence
  Antisense nucleotide
cggcatgtctattttgta

SEQ ID NO: 2031 - DNA, 20 bp, Artificial Sequence
  Antisense nucleotide
gctttcaccaaattggaagc

SEQ ID NO: 2032 - DNA, 14 bp, Artificial Sequence
  Antisense nucleotide
ctggcttttgggtt

SEQ ID NO: 2033 - DNA, 14 bp, Artificial Sequence
  Antisense nucleotide
cacacagtagtgca

SEQ ID NO: 2034 - DNA, 14 bp, Artificial Sequence
  Antisense nucleotide
gcacacagtagtgc

SEQ ID NO: 2035 - DNA, 17 bp, Artificial Sequence
  Antisense nucleotide
gcttgctcaggatctgc

SEQ ID NO: 2036 - DNA, 14 bp, Artificial Sequence
  Antisense nucleotide
tactcttcgtcgct

SEQ ID NO: 2037 - DNA, 14 bp, Artificial Sequence
  Antisense nucleotide
cttggcgtagtact

SEQ ID NO: 2038 - DNA, 14 bp, Artificial Sequence
  Antisense nucleotide
gtaaacctccttgg

SEQ ID NO: 2039 - DNA, 19 bp, Artificial Sequence
  Antisense nucleotide
gtctattttgtaaacctcc

SEQ ID NO: 2040 - DNA, 20 bp, Artificial Sequence
  Antisense nucleotide
gcatgtctattttgtaaacc

SEQ ID NO: 2041 - DNA, 14 bp, Artificial Sequence
  Antisense nucleotide
ggcatcaaggtacc

SEQ ID NO: 2042 - DNA, 14 bp, Artificial Sequence
  Antisense nucleotide
ctgtagaaagtggg

SEQ ID NO: 2043 - DNA, 18 bp, Artificial Sequence
  Antisense nucleotide
acaattctgaagtagggt

SEQ ID NO: 2044 - DNA, 18 bp, Artificial Sequence
  Antisense nucleotide
tcaccaaattggaagcat

SEQ ID NO: 2045 - DNA, 18 bp, Artificial Sequence
  Antisense nucleotide
tctgatatagctcaatcc

SEQ ID NO: 2046 - DNA, 18 bp, Artificial Sequence
  Antisense nucleotide
tcctagtggactttatag

SEQ ID NO: 2047 - DNA, 16 bp, Artificial Sequence
  Antisense nucleotide
tttttcctagtggact

SEQ ID NO: 2048 - DNA, 19 bp, Artificial Sequence
  Antisense nucleotide
caattatcctgcacatttc

SEQ ID NO: 2049 - DNA, 16 bp, Artificial Sequence
  Antisense nucleotide
gcaattatcctgcaca

SEQ ID NO: 2050 - DNA, 16 bp, Artificial Sequence
  Antisense nucleotide
gcagcaattatcctgc

SEQ ID NO: 2051 - DNA, 14 bp, Artificial Sequence
  Antisense nucleotide
tggcattgtaccct

SEQ ID NO: 2052 - DNA, 14 bp, Artificial Sequence
  Antisense nucleotide
tgtgctgagtgtct

SEQ ID NO: 2053 - DNA, 16 bp, Artificial Sequence
  Antisense nucleotide
cctgctgtgctgagtg

SEQ ID NO: 2054 - DNA, 14 bp, Artificial Sequence
  Antisense nucleotide
cttgggtgttttgc

SEQ ID NO: 2055 - DNA, 18 bp, Artificial Sequence
  Antisense nucleotide
tttagctgcatttgcaag

SEQ ID NO: 2056 - DNA, 14 bp, Artificial Sequence
  Antisense nucleotide
gccacttttccaag

SEQ ID NO: 2057 - DNA, 18 bp, Artificial Sequence
  Antisense nucleotide
ctgatgtgttgaagaaca

SEQ ID NO: 2058 - DNA, 14 bp, Artificial Sequence
  Antisense nucleotide
cgatagtcttgcag

SEQ ID NO: 2059 - DNA, 14 bp, Artificial Sequence
  Antisense nucleotide
gtcgatagtcttgc

SEQ ID NO: 2060 - DNA, 14 bp, Artificial Sequence
  Antisense nucleotide
cttggacaggatct

SEQ ID NO: 2061 - DNA, 14 bp, Artificial Sequence
  Antisense nucleotide
ccaggaattgttgc

SEQ ID NO: 2062 - DNA, 14 bp, Artificial Sequence
  Antisense nucleotide
cctcaatttcccct

SEQ ID NO: 2063 - DNA, 14 bp, Artificial Sequence
  Antisense nucleotide
gatgtccacttgca

SEQ ID NO: 2064 - DNA, 14 bp, Artificial Sequence
  Antisense nucleotide
ctccaaatgtaggg

SEQ ID NO: 2065 - DNA, 14 bp, Artificial Sequence
  Antisense nucleotide
accttgctgtactg

SEQ ID NO: 2066 - DNA, 14 bp, Artificial Sequence
  Antisense nucleotide
gtagtacacgatgg

SEQ ID NO: 2067 - DNA, 14 bp, Artificial Sequence
  Antisense nucleotide
cacgtagtacacga

SEQ ID NO: 2068 - DNA, 14 bp, Artificial Sequence
  Antisense nucleotide
catgttggacagct

SEQ ID NO: 2069 - DNA, 14 bp, Artificial Sequence
  Antisense nucleotide
gcacgatcatgttg

SEQ ID NO: 2070 - DNA, 16 bp, Artificial Sequence
  Antisense nucleotide
tgtactctgcttgaac

SEQ ID NO: 2071 - DNA, 16 bp, Artificial Sequence
  Antisense nucleotide
ctctgatgtgttgaag

SEQ ID NO: 2072 - DNA, 16 bp, Artificial Sequence
  Antisense nucleotide
ggaagtcaatgtacag

SEQ ID NO: 2073 - DNA, 18 bp, Artificial Sequence
  Antisense nucleotide
catgtcgatagtcttgca

SEQ ID NO: 2074 - DNA, 18 bp, Artificial Sequence
  Antisense nucleotide
agctgaagcaatagttgg

SEQ ID NO: 2075 - DNA, 18 bp, Artificial Sequence
  Antisense nucleotide
gtcatagatttcgttgtg

SEQ ID NO: 2076 - DNA, 18 bp, Artificial Sequence
  Antisense nucleotide
ctccacttttaacttgag

SEQ ID NO: 2077 - DNA, 18 bp, Artificial Sequence
  Antisense nucleotide
tgctgtatttctggtaca

SEQ ID NO: 2078 - DNA, 14 bp, Artificial Sequence
  Antisense nucleotide
tcgagcttccccca

SEQ ID NO: 2079 - DNA, 14 bp, Artificial Sequence
  Antisense nucleotide
ccccgagcccaagg

SEQ ID NO: 2080 - DNA, 13 bp, Artificial Sequence
  Antisense nucleotide
cccgacgagccgg

SEQ ID NO: 2081 - DNA, 14 bp, Artificial Sequence
  Antisense nucleotide
acgcaccaaggcga

SEQ ID NO: 2082 - DNA, 15 bp, Artificial Sequence
  Antisense nucleotide
cgggttgtcgagccc

SEQ ID NO: 2083 - DNA, 13 bp, Artificial Sequence
  Antisense nucleotide
cggcagtgccccg

SEQ ID NO: 2084 - DNA, 14 bp, Artificial Sequence
  Antisense nucleotide
cgcaattctgctcg

SEQ ID NO: 2085 - DNA, 14 bp, Artificial Sequence
  Antisense nucleotide
ttcgttgtgctccc

SEQ ID NO: 2086 - DNA, 14 bp, Artificial Sequence
  Antisense nucleotide
attccgactcggtg

SEQ ID NO: 2087 - DNA, 17 bp, Artificial Sequence
  Antisense nucleotide
acgtgcgtcatcaccgt

SEQ ID NO: 2088 - DNA, 10 bp, Artificial Sequence
  Antisense nucleotide
ccaagaagcc

SEQ ID NO: 2089 - DNA, 14 bp, Artificial Sequence
  Antisense nucleotide
cctaatgccttcca

SEQ ID NO: 2090 - DNA, 14 bp, Artificial Sequence
  Antisense nucleotide
tcagcagggccagg

SEQ ID NO: 2091 - DNA, 17 bp, Artificial Sequence
  Antisense nucleotide
gcaaagttcagcagggc

SEQ ID NO: 2092 - DNA, 16 bp, Artificial Sequence
  Antisense nucleotide
ggcaaagttcagcagg

SEQ ID NO: 2093 - DNA, 18 bp, Artificial Sequence
  Antisense nucleotide
gtggcaaagttcagcagg

SEQ ID NO: 2094 - DNA, 14 bp, Artificial Sequence
  Antisense nucleotide
gtggcaaagttcag

SEQ ID NO: 2095 - DNA, 18 bp, Artificial Sequence
  Antisense nucleotide
gaccgtggcaaagttcag

SEQ ID NO: 2096 - DNA, 15 bp, Artificial Sequence
  Antisense nucleotide
agagaggctgaccgt

SEQ ID NO: 2097 - DNA, 17 bp, Artificial Sequence
  Antisense nucleotide
gagagagagaggctgac

SEQ ID NO: 2098 - DNA, 15 bp, Artificial Sequence
  Antisense nucleotide
acagagagaggctga

SEQ ID NO: 2099 - DNA, 15 bp, Artificial Sequence
  Antisense nucleotide
gtggacagagagagg

SEQ ID NO: 2100 - DNA, 18 bp, Artificial Sequence
  Antisense nucleotide
caactggacagagagagg

SEQ ID NO: 2101 - DNA, 16 bp, Artificial Sequence
  Antisense nucleotide
tcttcttgatgtggcc

SEQ ID NO: 2102 - DNA, 17 bp, Artificial Sequence
  Antisense nucleotide
ccctcttcttcttgatg

SEQ ID NO: 2103 - DNA, 14 bp, Artificial Sequence
  Antisense nucleotide
caccctcttcttct

SEQ ID NO: 2104 - DNA, 17 bp, Artificial Sequence
  Antisense nucleotide
atggatttctttggcat

SEQ ID NO: 2105 - DNA, 13 bp, Artificial Sequence
  Antisense nucleotide
ggatttctttggc

SEQ ID NO: 2106 - DNA, 18 bp, Artificial Sequence
  Antisense nucleotide
aagttggactctcttctc

SEQ ID NO: 2107 - DNA, 18 bp, Artificial Sequence
  Antisense nucleotide
taagttggactctcttct

SEQ ID NO: 2108 - DNA, 16 bp, Artificial Sequence
  Antisense nucleotide
taggagtggttgaggc

SEQ ID NO: 2109 - DNA, 17 bp, Artificial Sequence
  Antisense nucleotide
gtgtaggagtggttgag

SEQ ID NO: 2110 - DNA, 14 bp, Artificial Sequence
  Antisense nucleotide
ctgtgtaggagtgg

SEQ ID NO: 2111 - DNA, 14 bp, Artificial Sequence
  Antisense nucleotide
cccacatgcctgtg

SEQ ID NO: 2112 - DNA, 14 bp, Artificial Sequence
  Antisense nucleotide
cgatgaacaacgag

SEQ ID NO: 2113 - DNA, 16 bp, Artificial Sequence
  Antisense nucleotide
ctggcgatgaacaacg

SEQ ID NO: 2114 - DNA, 14 bp, Artificial Sequence
  Antisense nucleotide
cgctggcgatgaac

SEQ ID NO: 2115 - DNA, 15 bp, Artificial Sequence
  Antisense nucleotide
gagctagtcccgttg

SEQ ID NO: 2116 - DNA, 15 bp, Artificial Sequence
  Antisense nucleotide
gcgaagagctagtcc

SEQ ID NO: 2117 - DNA, 17 bp, Artificial Sequence
  Antisense nucleotide
ccagttatgcgaagagc

SEQ ID NO: 2118 - DNA, 16 bp, Artificial Sequence
  Antisense nucleotide
ccccagttatgcgaag

SEQ ID NO: 2119 - DNA, 14 bp, Artificial Sequence
  Antisense nucleotide
cggccgcggtgtgt

SEQ ID NO: 2120 - DNA, 17 bp, Artificial Sequence
  Antisense nucleotide
cgggaatgcttccgccg

SEQ ID NO: 2121 - DNA, 17 bp, Artificial Sequence
  Antisense nucleotide
cggctcaccgcctcggc

SEQ ID NO: 2122 - DNA, 14 bp, Artificial Sequence
  Antisense nucleotide
cacgtctgcggatc

SEQ ID NO: 2123 - DNA, 18 bp, Artificial Sequence
  Antisense nucleotide
ccccgcatcgcatcaggg

SEQ ID NO: 2124 - DNA, 14 bp, Artificial Sequence
  Antisense nucleotide
cgccttgcaacgcg

SEQ ID NO: 2125 - DNA, 14 bp, Artificial Sequence
  Antisense nucleotide
ccgaccggggccgg

SEQ ID NO: 2126 - DNA, 14 bp, Artificial Sequence
  Antisense nucleotide
gttcatggtttcgg

SEQ ID NO: 2127 - DNA, 15 bp, Artificial Sequence
  Antisense nucleotide
gcagaaagttcatgg

SEQ ID NO: 2128 - DNA, 14 bp, Artificial Sequence
  Antisense nucleotide
gctgatagacatcc

SEQ ID NO: 2129 - DNA, 14 bp, Artificial Sequence
  Antisense nucleotide
gcgctgatagacat

SEQ ID NO: 2130 - DNA, 16 bp, Artificial Sequence
  Antisense nucleotide
gtagctgcgctgatag

SEQ ID NO: 2131 - DNA, 14 bp, Artificial Sequence
  Antisense nucleotide
ctcgatctcatcag

SEQ ID NO: 2132 - DNA, 17 bp, Artificial Sequence
  Antisense nucleotide
atgtactcgatctcatc

SEQ ID NO: 2133 - DNA, 16 bp, Artificial Sequence
  Antisense nucleotide
gaagatgtactcgatc

SEQ ID NO: 2134 - DNA, 16 bp, Artificial Sequence
  Antisense nucleotide
cttgaagatgtactcg

SEQ ID NO: 2135 - DNA, 14 bp, Artificial Sequence
  Antisense nucleotide
gcatcgcatcaggg

SEQ ID NO: 2136 - DNA, 14 bp, Artificial Sequence
  Antisense nucleotide
ccgcatcgcatcag

SEQ ID NO: 2137 - DNA, 18 bp, Artificial Sequence
  Antisense nucleotide
catttgttgtgctgtagg

SEQ ID NO: 2138 - DNA, 18 bp, Artificial Sequence
  Antisense nucleotide
ggtctgcattcacatttg

SEQ ID NO: 2139 - DNA, 15 bp, Artificial Sequence
  Antisense nucleotide
ctttggtctgcattc

SEQ ID NO: 2140 - DNA, 15 bp, Artificial Sequence
  Antisense nucleotide
ctttctttggtctgc

SEQ ID NO: 2141 - DNA, 17 bp, Artificial Sequence
  Antisense nucleotide
gctctatctttctttgg

SEQ ID NO: 2142 - DNA, 17 bp, Artificial Sequence
  Antisense nucleotide
gtcttgctctatctttc

SEQ ID NO: 2143 - DNA, 16 bp, Artificial Sequence
  Antisense nucleotide
cttgtcttgctctatc

SEQ ID NO: 2144 - DNA, 18 bp, Artificial Sequence
  Antisense nucleotide
catctgcaagtacgttcg

SEQ ID NO: 2145 - DNA, 18 bp, Artificial Sequence
  Antisense nucleotide
cacatctgcaagtacgtt

SEQ ID NO: 2146 - DNA, 18 bp, Artificial Sequence
  Antisense nucleotide
gtcacatctgcaagtacg

SEQ ID NO: 2147 - DNA, 14 bp, Artificial Sequence
  Antisense nucleotide
catctgcaagtacg

SEQ ID NO: 2148 - DNA, 15 bp, Artificial Sequence
  Antisense nucleotide
cacatctgcaagtac

SEQ ID NO: 2149 - DNA, 14 bp, Artificial Sequence
  Antisense nucleotide
gtcacatctgcaag

SEQ ID NO: 2150 - DNA, 14 bp, Artificial Sequence
  Antisense nucleotide
cttgtcacatctgc

SEQ ID NO: 2151 - DNA, 16 bp, Artificial Sequence
  Antisense nucleotide
ggcttgtcacatctgc

SEQ ID NO: 2152 - DNA, 16 bp, Artificial Sequence
  Antisense nucleotide
ctcggcttgtcacatc

SEQ ID NO: 2153 - DNA, 14 bp, Artificial Sequence
  Antisense nucleotide
ctccttcctcctgc

SEQ ID NO: 2154 - DNA, 18 bp, Artificial Sequence
  Antisense nucleotide
gcttgaagatgtacctcg

SEQ ID NO: 2155 - DNA, 15 bp, Artificial Sequence
  Antisense nucleotide
cgttgctctccgacg

SEQ ID NO: 2156 - DNA, 18 bp, Artificial Sequence
  Antisense nucleotide
cttcttttgcaagtctgt

SEQ ID NO: 2157 - DNA, 18 bp, Artificial Sequence
  Antisense nucleotide
tgagctgtgcatgccttc

SEQ ID NO: 2158 - DNA, 15 bp, Artificial Sequence
  Antisense nucleotide
agtcaggaggaccag

SEQ ID NO: 2159 - DNA, 15 bp, Artificial Sequence
  Antisense nucleotide
tgggtgccctggcct

SEQ ID NO: 2160 - DNA, 15 bp, Artificial Sequence
  Antisense nucleotide
catgttaggcaggtt

SEQ ID NO: 2161 - DNA, 17 bp, Artificial Sequence
  Antisense nucleotide
aggcatctcggagatct

SEQ ID NO: 2162 - DNA, 16 bp, Artificial Sequence
  Antisense nucleotide
aaagtcttcactctgc

SEQ ID NO: 2163 - DNA, 17 bp, Artificial Sequence
  Antisense nucleotide
aacaagttgtccagctg

SEQ ID NO: 2164 - DNA, 18 bp, Artificial Sequence
  Antisense nucleotide
gtaaaactggatcatctc

SEQ ID NO: 2165 - DNA, 15 bp, Artificial Sequence
  Antisense nucleotide
catcacctcctccag

SEQ ID NO: 2166 - DNA, 18 bp, Artificial Sequence
  Antisense nucleotide
gggtcttcaggttctccc

SEQ ID NO: 2167 - DNA, 18 bp, Artificial Sequence
  Antisense nucleotide
cacggccttgctcttgtt

SEQ ID NO: 2168 - DNA, 18 bp, Artificial Sequence
  Antisense nucleotide
ttattaaaggcattcttc

SEQ ID NO: 2169 - DNA, 18 bp, Artificial Sequence
  Antisense nucleotide
aagatgtcaaactcactc

SEQ ID NO: 2170 - DNA, 18 bp, Artificial Sequence
  Antisense nucleotide
gtagttgatgaagatgtc

SEQ ID NO: 2171 - DNA, 16 bp, Artificial Sequence
  Antisense nucleotide
gattttggagacctct

SEQ ID NO: 2172 - DNA, 16 bp, Artificial Sequence
  Antisense nucleotide
tcagctatcccagagc

SEQ ID NO: 2173 - DNA, 15 bp, Artificial Sequence
  Antisense nucleotide
ggctgggtcagctat

SEQ ID NO: 2174 - DNA, 18 bp, Artificial Sequence
  Antisense nucleotide
aaatcgttcacagagaag

SEQ ID NO: 2175 - DNA, 18 bp, Artificial Sequence
  Antisense nucleotide
tctttctaaatcgttcac

SEQ ID NO: 2176 - DNA, 14 bp, Artificial Sequence
  Antisense nucleotide
ttcatgtctgtgcc

SEQ ID NO: 2177 - DNA, 14 bp, Artificial Sequence
  Antisense nucleotide
gtaggtgagttcca

SEQ ID NO: 2178 - DNA, 14 bp, Artificial Sequence
  Antisense nucleotide
gttgtgagcgatga

SEQ ID NO: 2179 - DNA, 18 bp, Artificial Sequence
  Antisense nucleotide
catagttgtcctcaaaga

SEQ ID NO: 2180 - DNA, 14 bp, Artificial Sequence
  Antisense nucleotide
ggcatagttgtcct

SEQ ID NO: 2181 - DNA, 14 bp, Artificial Sequence
  Antisense nucleotide
cattgtctagcacg

SEQ ID NO: 2182 - DNA, 14 bp, Artificial Sequence
  Antisense nucleotide
ctccattgtctagc

SEQ ID NO: 2183 - DNA, 14 bp, Artificial Sequence
  Antisense nucleotide
gtattgttcagcgg

SEQ ID NO: 2184 - DNA, 16 bp, Artificial Sequence
  Antisense nucleotide
tcaagatctctgtgag

SEQ ID NO: 2185 - DNA, 16 bp, Artificial Sequence
  Antisense nucleotide
cacaaaatcgtgtcct

SEQ ID NO: 2186 - DNA, 16 bp, Artificial Sequence
  Antisense nucleotide
tccttccacaaaatcg

SEQ ID NO: 2187 - DNA, 14 bp, Artificial Sequence
  Antisense nucleotide
gtggaagatgtcct

SEQ ID NO: 2188 - DNA, 16 bp, Artificial Sequence
  Antisense nucleotide
tcttgtggaagatgtc

SEQ ID NO: 2189 - DNA, 16 bp, Artificial Sequence
  Antisense nucleotide
tctatcagtgtgagag

SEQ ID NO: 2190 - DNA, 14 bp, Artificial Sequence
  Antisense nucleotide
ggttggtgtctatc

SEQ ID NO: 2191 - DNA, 14 bp, Artificial Sequence
  Antisense nucleotide
acatcggagaacag

SEQ ID NO: 2192 - DNA, 14 bp, Artificial Sequence
  Antisense nucleotide
ccttacacatcgga

SEQ ID NO: 2193 - DNA, 16 bp, Artificial Sequence
  Antisense nucleotide
acaatcctcagaactc

SEQ ID NO: 2194 - DNA, 14 bp, Artificial Sequence
  Antisense nucleotide
gctctgacaatcct

SEQ ID NO: 2195 - DNA, 14 bp, Artificial Sequence
  Antisense nucleotide
tggttgaagtggag

SEQ ID NO: 2196 - DNA, 14 bp, Artificial Sequence
  Antisense nucleotide
ctgtggttgaagtg

SEQ ID NO: 2197 - DNA, 14 bp, Artificial Sequence
  Antisense nucleotide
gttgtaggtgacca

SEQ ID NO: 2198 - DNA, 14 bp, Artificial Sequence
  Antisense nucleotide
ctgtgttgtaggtg

SEQ ID NO: 2199 - DNA, 14 bp, Artificial Sequence
  Antisense nucleotide
gactcaaacgtgtc

SEQ ID NO: 2200 - DNA, 14 bp, Artificial Sequence
  Antisense nucleotide
catggactcaaacg

SEQ ID NO: 2201 - DNA, 14 bp, Artificial Sequence
  Antisense nucleotide
cgaatgtataccgg

SEQ ID NO: 2202 - DNA, 14 bp, Artificial Sequence
  Antisense nucleotide
ccgaatgtataccg

SEQ ID NO: 2203 - DNA, 14 bp, Artificial Sequence
  Antisense nucleotide
gccgaatgtatacc

SEQ ID NO: 2204 - DNA, 14 bp, Artificial Sequence
  Antisense nucleotide
gtagttgtagggac

SEQ ID NO: 2205 - DNA, 18 bp, Artificial Sequence
  Antisense nucleotide
tagaaaggtagttgtagg

SEQ ID NO: 2206 - DNA, 18 bp, Artificial Sequence
  Antisense nucleotide
gtagaaaggtagttgtag

SEQ ID NO: 2207 - DNA, 16 bp, Artificial Sequence
  Antisense nucleotide
cgtagaaaggtagttg

SEQ ID NO: 2208 - DNA, 14 bp, Artificial Sequence
  Antisense nucleotide
ccgtagaaaggtag

SEQ ID NO: 2209 - DNA, 14 bp, Artificial Sequence
  Antisense nucleotide
gaccatagcacact

SEQ ID NO: 2210 - DNA, 14 bp, Artificial Sequence
  Antisense nucleotide
ggatattggcactg

SEQ ID NO: 2211 - DNA, 14 bp, Artificial Sequence
  Antisense nucleotide
cctggatattggca

SEQ ID NO: 2212 - DNA, 14 bp, Artificial Sequence
  Antisense nucleotide
gctcccaaagatct

SEQ ID NO: 2213 - DNA, 14 bp, Artificial Sequence
  Antisense nucleotide
cccatcaaagctct

SEQ ID NO: 2214 - DNA, 14 bp, Artificial Sequence
  Antisense nucleotide
caaacacttggagc

SEQ ID NO: 2215 - DNA, 16 bp, Artificial Sequence
  Antisense nucleotide
gtctcaaacacttgga

SEQ ID NO: 2216 - DNA, 16 bp, Artificial Sequence
  Antisense nucleotide
gagtctcaaacacttg

SEQ ID NO: 2217 - DNA, 16 bp, Artificial Sequence
  Antisense nucleotide
gtaacctgtgatctct

SEQ ID NO: 2218 - DNA, 14 bp, Artificial Sequence
  Antisense nucleotide
ggtaacctgtgatc

SEQ ID NO: 2219 - DNA, 16 bp, Artificial Sequence
  Antisense nucleotide
gtataggtaacctgtg

SEQ ID NO: 2220 - DNA, 18 bp, Artificial Sequence
  Antisense nucleotide
tgagatgtataggtaacc

SEQ ID NO: 2221 - DNA, 16 bp, Artificial Sequence
  Antisense nucleotide
tgctgagatgtatagg

SEQ ID NO: 2222 - DNA, 14 bp, Artificial Sequence
  Antisense nucleotide
ccatgctgagatgt

SEQ ID NO: 2223 - DNA, 14 bp, Artificial Sequence
  Antisense nucleotide
ggattacttgcagg

SEQ ID NO: 2224 - DNA, 16 bp, Artificial Sequence
  Antisense nucleotide
tgttatggtggatgag

SEQ ID NO: 2225 - DNA, 14 bp, Artificial Sequence
  Antisense nucleotide
ggtgttatggtgga

SEQ ID NO: 2226 - DNA, 14 bp, Artificial Sequence
  Antisense nucleotide
gcagttgacacact

SEQ ID NO: 2227 - DNA, 14 bp, Artificial Sequence
  Antisense nucleotide
agtactcggcattc

SEQ ID NO: 2228 - DNA, 16 bp, Artificial Sequence
  Antisense nucleotide
cattcacatactccct

SEQ ID NO: 2229 - DNA, 16 bp, Artificial Sequence
  Antisense nucleotide
tccaaaacaggtcact

SEQ ID NO: 2230 - DNA, 14 bp, Artificial Sequence
  Antisense nucleotide
ggtccttatagtgg

SEQ ID NO: 2231 - DNA, 14 bp, Artificial Sequence
  Antisense nucleotide
cagaatgccaacca

SEQ ID NO: 2232 - DNA, 14 bp, Artificial Sequence
  Antisense nucleotide
acgagaatgccaac

SEQ ID NO: 2233 - DNA, 14 bp, Artificial Sequence
  Antisense nucleotide
gatcccaaagacca

SEQ ID NO: 2234 - DNA, 14 bp, Artificial Sequence
  Antisense nucleotide
tcgcttgatgagga

SEQ ID NO: 2235 - DNA, 14 bp, Artificial Sequence
  Antisense nucleotide
catcgtgtacttcc

SEQ ID NO: 2236 - DNA, 14 bp, Artificial Sequence
  Antisense nucleotide
gcatcgtgtacttc

SEQ ID NO: 2237 - DNA, 14 bp, Artificial Sequence
  Antisense nucleotide
actgtgccaaaagc

SEQ ID NO: 2238 - DNA, 14 bp, Artificial Sequence
  Antisense nucleotide
cttgtagactgtgc

SEQ ID NO: 2239 - DNA, 14 bp, Artificial Sequence
  Antisense nucleotide
cccttgtagactgt

SEQ ID NO: 2240 - DNA, 16 bp, Artificial Sequence
  Antisense nucleotide
tcaacactttgatggc

SEQ ID NO: 2241 - DNA, 14 bp, Artificial Sequence
  Antisense nucleotide
ccctcaacactttg

SEQ ID NO: 2242 - DNA, 16 bp, Artificial Sequence
  Antisense nucleotide
gtgttttccctcaaca

SEQ ID NO: 2243 - DNA, 16 bp, Artificial Sequence
  Antisense nucleotide
gtatgcttcgtctaag

SEQ ID NO: 2244 - DNA, 14 bp, Artificial Sequence
  Antisense nucleotide
cgtatgcttcgtct

SEQ ID NO: 2245 - DNA, 14 bp, Artificial Sequence
  Antisense nucleotide
ccatcacgtatgct

SEQ ID NO: 2246 - DNA, 14 bp, Artificial
  Antisense nucleotide
gcataagctgtgtc

SEQ ID NO: 2247 - DNA, 14 bp, Artificial
  Antisense nucleotide
catggtctaagagg

SEQ ID NO: 2248 - DNA, 16 bp, Artificial Sequence
  Antisense nucleotide
caatctgcatacacca

SEQ ID NO: 2249 - DNA, 14 bp, Artificial Sequence
  Antisense nucleotide
ggcaatctgcatac

SEQ ID NO: 2250 - DNA, 14 bp, Artificial Sequence
  Antisense nucleotide
ctgtctcgtcaatg

SEQ ID NO: 2251 - DNA, 16 bp, Artificial Sequence
  Antisense nucleotide
cataactccacacatc

SEQ ID NO: 2252 - DNA, 16 bp, Artificial Sequence
  Antisense nucleotide
agtcacaccataactc

SEQ ID NO: 2253 - DNA, 16 bp, Artificial Sequence
  Antisense nucleotide
acagtcacaccataac

SEQ ID NO: 2254 - DNA, 14 bp, Artificial Sequence
  Antisense nucleotide
ccccaaaagtcatc

SEQ ID NO: 2255 - DNA, 14 bp, Artificial Sequence
  Antisense nucleotide
tcgtaaggtttggc

SEQ ID NO: 2256 - DNA, 14 bp, Artificial Sequence
  Antisense nucleotide
gatcccatcgtaag

SEQ ID NO: 2257 - DNA, 14 bp, Artificial Sequence
  Antisense nucleotide
caatggtgcagatg

SEQ ID NO: 2258 - DNA, 14 bp, Artificial Sequence
  Antisense nucleotide
gacatcaatggtgc

SEQ ID NO: 2259 - DNA, 16 bp, Artificial Sequence
  Antisense nucleotide
gtagacatcaatggtg

SEQ ID NO: 2260 - DNA, 18 bp, Artificial Sequence
  Antisense nucleotide
catgatcatgtagacatc

SEQ ID NO: 2261 - DNA, 16 bp, Artificial Sequence
  Antisense nucleotide
ccatgatcatgtagac

SEQ ID NO: 2262 - DNA, 18 bp, Artificial Sequence
  Antisense nucleotide
catttgaccatgatcatg

SEQ ID NO: 2263 - DNA, 16 bp, Artificial Sequence
  Antisense nucleotide
ccaacatttgaccatg

SEQ ID NO: 2264 - DNA, 18 bp, Artificial Sequence
  Antisense nucleotide
tcatccaacatttgacca

SEQ ID NO: 2265 - DNA, 18 bp, Artificial Sequence
  Antisense nucleotide
gagtcaatcatccaacat

SEQ ID NO: 2266 - DNA, 16 bp, Artificial Sequence
  Antisense nucleotide
cagagtcaatcatcca

SEQ ID NO: 2267 - DNA, 14 bp, Artificial Sequence
  Antisense nucleotide
ccgacattcagagt

SEQ ID NO: 2268 - DNA, 16 bp, Artificial Sequence
  Antisense nucleotide
gaattcagacaccaac

SEQ ID NO: 2269 - DNA, 14 bp, Artificial Sequence
  Antisense nucleotide
gatgaccacaaagc

SEQ ID NO: 2270 - DNA, 16 bp, Artificial Sequence
  Antisense nucleotide
ccatcaaatacatcgg

SEQ ID NO: 2271 - DNA, 18 bp, Artificial Sequence
  Antisense nucleotide
tcaccatcaaatacatcg

SEQ ID NO: 2272 - DNA, 14 bp, Artificial Sequence
  Antisense nucleotide
caacgtagccatca

SEQ ID NO: 2273 - DNA, 14 bp, Artificial Sequence
  Antisense nucleotide
acgtctttgacgac

SEQ ID NO: 2274 - DNA, 18 bp, Artificial Sequence
  Antisense nucleotide
caaaaacgtctttgacga

SEQ ID NO: 2275 - DNA, 16 bp, Artificial Sequence
  Antisense nucleotide
ggcaaaaacgtctttg

SEQ ID NO: 2276 - DNA, 16 bp, Artificial Sequence
  Antisense nucleotide
caaaggcaaaaacgtc

SEQ ID NO: 2277 - DNA, 14 bp, Artificial Sequence
  Antisense nucleotide
gtgtcaagtactcg

SEQ ID NO: 2278 - DNA, 16 bp, Artificial Sequence
  Antisense nucleotide
gtaatagaggttgtcg

SEQ ID NO: 2279 - DNA, 14 bp, Artificial Sequence
  Antisense nucleotide
cccagtaatagagg

SEQ ID NO: 2280 - DNA, 14 bp, Artificial Sequence
  Antisense nucleotide
catggtgctcactg

SEQ ID NO: 2281 - DNA, 14 bp, Artificial Sequence
  Antisense nucleotide
gtgcctgtacgtac

SEQ ID NO: 2282 - DNA, 14 bp, Artificial Sequence
  Antisense nucleotide
tcggactatactgc

SEQ ID NO: 2283 - DNA, 16 bp, Artificial Sequence
  Antisense nucleotide
cagttcggactatact

SEQ ID NO: 2284 - DNA, 14 bp, Artificial Sequence
  Antisense nucleotide
aagcctaagacgca

SEQ ID NO: 2285 - DNA, 14 bp, Artificial Sequence
  Antisense nucleotide
gcccaagttcaaca

SEQ ID NO: 2286 - DNA, 14 bp, Artificial Sequence
  Antisense nucleotide
tgaaaagtcgcggt

SEQ ID NO: 2287 - DNA, 18 bp, Artificial Sequence
  Antisense nucleotide
ggttaattaagatgcctc

SEQ ID NO: 2288 - DNA, 14 bp, Artificial Sequence
  Antisense nucleotide
tctctaagagcgca

SEQ ID NO: 2289 - DNA, 16 bp, Artificial Sequence
  Antisense nucleotide
acgtgaggttagtttg

SEQ ID NO: 2290 - DNA, 14 bp, Artificial Sequence
  Antisense nucleotide
cacgtgaggttagt

SEQ ID NO: 2291 - DNA, 14 bp, Artificial Sequence
  Antisense nucleotide
catagaacagtccg

SEQ ID NO: 2292 - DNA, 16 bp, Artificial Sequence
  Antisense nucleotide
cagtcatagaacagtc

SEQ ID NO: 2293 - DNA, 18 bp, Artificial Sequence
  Antisense nucleotide
ctttgcagtcatagaaca

SEQ ID NO: 2294 - DNA, 14 bp, Artificial Sequence
  Antisense nucleotide
tgcagtcatagaac

SEQ ID NO: 2295 - DNA, 14 bp, Artificial Sequence
  Antisense nucleotide
ggtcgtttccatct

SEQ ID NO: 2296 - DNA, 16 bp, Artificial Sequence
  Antisense nucleotide
catagaaggtcgtttc

SEQ ID NO: 2297 - DNA, 14 bp, Artificial Sequence
  Antisense nucleotide
cgtcatagaaggtc

SEQ ID NO: 2298 - DNA, 15 bp, Artificial Sequence
  Antisense nucleotide
catcgtcatagaagg

SEQ ID NO: 2299 - DNA, 24 bp, Artificial Sequence
  Antisense nucleotide
ggacgggaggaacgaggcgttgag

SEQ ID NO: 2300 - DNA, 14 bp, Artificial Sequence
  Antisense nucleotide
tagccataaggtcc

SEQ ID NO: 2301 - DNA, 14 bp, Artificial Sequence
  Antisense nucleotide
ggttactgtagcca

SEQ ID NO: 2302 - DNA, 14 bp, Artificial Sequence
  Antisense nucleotide
ggttactgtagcca

SEQ ID NO: 2303 - DNA, 30 bp, Artificial Sequence
  Antisense nucleotide
cagggtcatgctctgtttcaggatcttggg

SEQ ID NO: 2304 - DNA, 18 bp, Artificial Sequence
  Antisense nucleotide
agttcttggcgcggaggt

SEQ ID NO: 2305 - DNA, 18 bp, Artificial Sequence
  Antisense nucleotide
aggtgaggaggtccgagt

SEQ ID NO: 2306 - DNA, 16 bp, Artificial Sequence
  Antisense nucleotide
tggactggattatcag

SEQ ID NO: 2307 - DNA, 18 bp, Artificial Sequence
  Antisense nucleotide
gtggtggtgatgtgcccg

SEQ ID NO: 2308 - DNA, 14 bp, Artificial Sequence
  Antisense nucleotide
tgtcacgttcttgg

SEQ ID NO: 2309 - DNA, 14 bp, Artificial Sequence
  Antisense nucleotide
ctcatctgtcacgt

SEQ ID NO: 2310 - DNA, 18 bp, Artificial Sequence
  Antisense nucleotide
cgaagccctcggcgaacc

SEQ ID NO: 2311 - DNA, 24 bp, Artificial Sequence
  Antisense nucleotide
gcgtgttctggctgtgcagttcgg

SEQ ID NO: 2312 - DNA, 14 bp, Artificial Sequence
  Antisense nucleotide
ctgccccgttgacc

SEQ ID NO: 2313 - DNA, 14 bp, Artificial Sequence
  Antisense nucleotide
aggtttgcgtagac

SEQ ID NO: 2314 - DNA, 14 bp, Artificial Sequence
  Antisense nucleotide
ggttgaagttgctg

SEQ ID NO: 2315 - DNA, 14 bp, Artificial Sequence
  Antisense nucleotide
ctgggttgaagttg

SEQ ID NO: 2316 - DNA, 24 bp, Artificial Sequence
  Antisense nucleotide
tgctggggttgcgcgggaaaggcc

SEQ ID NO: 2317 - DNA, 20 bp, Artificial Sequence
  Antisense nucleotide
tgctgcacgggcatctgctg

SEQ ID NO: 2318 - DNA, 27 bp, Artificial Sequence
  Antisense nucleotide
ggcactgtctgaggctcctccttcagg

SEQ ID NO: 2319 - DNA, 14 bp, Artificial Sequence
  Antisense nucleotide
actccatgtcgatg

SEQ ID NO: 2320 - DNA, 16 bp, Artificial Sequence
  Antisense nucleotide
ctctccgccttgatcc

SEQ ID NO: 2321 - DNA, 16 bp, Artificial Sequence
  Antisense nucleotide
gttcctcatgcgcttc

SEQ ID NO: 2322 - DNA, 14 bp, Artificial Sequence
  Antisense nucleotide
ctgagctttcaagg

SEQ ID NO: 2323 - DNA, 26 bp, Artificial Sequence
  Antisense nucleotide
gcgattctctccagcttcctttttcg

SEQ ID NO: 2324 - DNA, 30 bp, Artificial Sequence; identical to SEQ ID NO: 1131
  Antisense nucleotide

SEQ ID NO: 2325 - DNA, 14 bp, Artificial Sequence
  Antisense nucleotide
tccctgagcatgtt

SEQ ID NO: 2326 - DNA, 16 bp, Artificial Sequence
  Antisense nucleotide
tctgtttaagctgtgc

SEQ ID NO: 2327 - DNA, 18 bp, Artificial Sequence
  Antisense nucleotide
ctttctgtttaagctgtg

SEQ ID NO: 2328 - DNA, 16 bp, Artificial Sequence
  Antisense nucleotide
ggttcatgactttctg

SEQ ID NO: 2329 - DNA, 14 bp, Artificial Sequence
  Antisense nucleotide
cgtggttcatgact

SEQ ID NO: 2330 - DNA, 16 bp, Artificial Sequence
  Antisense nucleotide
actgttaacgtggttc

SEQ ID NO: 2331 - DNA, 14 bp, Artificial Sequence
  Antisense nucleotide
ccactgttaacgtg

SEQ ID NO: 2332 - DNA, 14 bp, Artificial Sequence
  Antisense nucleotide
cccactgttaacgt

SEQ ID NO: 2333 - DNA, 14 bp, Artificial Sequence
  Antisense nucleotide
agcatgagttggca

SEQ ID NO: 2334 - DNA, 14 bp, Artificial Sequence
  Antisense nucleotide
gcgttagcatgagt

SEQ ID NO: 2335 - DNA, 14 bp, Artificial Sequence
  Antisense nucleotide
gtttgcaactgctg

SEQ ID NO: 2336 - DNA, 18 bp, Artificial Sequence
  Antisense nucleotide
caaaatgtttgcaactgc

SEQ ID NO: 2337 - DNA, 14 bp, Artificial Sequence
  Antisense nucleotide
tcgtagaaggtcgt

SEQ ID NO: 2338 - DNA, 14 bp, Artificial Sequence
  Antisense nucleotide
agggttactgtagc

SEQ ID NO: 2339 - DNA, 14 bp, Artificial Sequence
  Antisense nucleotide
gtagtggtgatgtg

SEQ ID NO: 2340 - DNA, 14 bp, Artificial Sequence
  Antisense nucleotide
cgtcgtagaaggtc

SEQ ID NO: 2341 - DNA, 14 bp, Artificial Sequence
  Antisense nucleotide
cgagaacatcatcg

SEQ ID NO: 2342 - DNA, 14 bp, Artificial Sequence
  Antisense nucleotide
gtagtctgcgttga

SEQ ID NO: 2343 - DNA, 20 bp, Artificial Sequence
  Antisense nucleotide
gctgcagcgggaggatgacg

SEQ ID NO: 2344 - DNA, 16 bp, Artificial Sequence
  Antisense nucleotide
agtaagagaggctatc

SEQ ID NO: 2345 - DNA, 14 bp, Artificial Sequence
  Antisense nucleotide
gtagtaagagaggc

SEQ ID NO: 2346 - DNA, 14 bp, Artificial Sequence
  Antisense nucleotide
ggtagtaagagagg

SEQ ID NO: 2347 - DNA, 16 bp, Artificial Sequence
  Antisense nucleotide
gtgagtggtagtaaga

SEQ ID NO: 2348 - DNA, 18 bp, Artificial Sequence
  Antisense nucleotide
gtccgtgcagaagtcctg

SEQ ID NO: 2349 - DNA, 16 bp, Artificial Sequence
  Antisense nucleotide
gaatgaagttggcact

SEQ ID NO: 2350 - DNA, 14 bp, Artificial Sequence
  Antisense nucleotide
ggaatgaagttggc

SEQ ID NO: 2351 - DNA, 14 bp, Artificial Sequence
  Antisense nucleotide
gggaatgaagttgg

SEQ ID NO: 2352 - DNA, 30 bp, Artificial Sequence; identical to SEQ ID NO: 1194
  Antisense nucleotide

SEQ ID NO: 2353 - DNA, 30 bp, Artificial Sequence
  Antisense nucleotide
ctggtctgcgatggggccacagaggagacg

SEQ ID NO: 2354 - DNA, 16 bp, Artificial Sequence
  Antisense nucleotide
tcatggtcttcacaac

SEQ ID NO: 2355 - DNA, 30 bp, Artificial Sequence; identical to SEQ ID NO: 1196
  Antisense nucleotide

SEQ ID NO: 2356 - DNA, 14 bp, Artificial Sequence
  Antisense nucleotide
ctagagttcctcac

SEQ ID NO: 2357 - DNA, 14 bp, Artificial Sequence
  Antisense nucleotide
gagtacgctagagt

SEQ ID NO: 2358 - DNA, 14 bp, Artificial Sequence
  Antisense nucleotide
gaagagtacgctag

SEQ ID NO: 2359 - DNA, 28 bp, Artificial Sequence
  Antisense nucleotide
ctgcttcccacccagcccccacattccc

SEQ ID NO: 2360 - DNA, 20 bp, Artificial Sequence
  Antisense nucleotide
ttcatcctctgtactgggct

SEQ ID NO: 2361 - DNA, 14 bp, Artificial Sequence
  Antisense nucleotide
gttacggatgtgca

SEQ ID NO: 2362 - DNA, 14 bp, Artificial Sequence
  Antisense nucleotide
cagttacggatgtg

SEQ ID NO: 2363 - DNA, 14 bp, Artificial Sequence
  Antisense nucleotide
ccagttacggatgt

SEQ ID NO: 2364 - DNA, 14 bp, Artificial Sequence
  Antisense nucleotide
agagtctgagttgg

SEQ ID NO: 2365 - DNA, 14 bp, Artificial Sequence
  Antisense nucleotide
gtgagactcagagt

SEQ ID NO: 2366 - DNA, 14 bp, Artificial Sequence
  Antisense nucleotide
tcttagggtgagac

SEQ ID NO: 2367 - DNA, 15 bp, Artificial Sequence
  Antisense nucleotide
agagtacttcttagg

SEQ ID NO: 2368 - DNA, 18 bp, Artificial Sequence
  Antisense nucleotide
ggaagaaactatgagagt

SEQ ID NO: 2369 - DNA, 18 bp, Artificial Sequence
  Antisense nucleotide
cttagggaagaaactatg

SEQ ID NO: 2370 - DNA, 16 bp, Artificial Sequence
  Antisense nucleotide
cggtaagaaacttagg

SEQ ID NO: 2371 - DNA, 14 bp, Artificial Sequence
  Antisense nucleotide
agcatgcggtaaga

SEQ ID NO: 2372 - DNA, 14 bp, Artificial Sequence
  Antisense nucleotide
gtctgaaagcatgc

SEQ ID NO: 2373 - DNA, 16 bp, Artificial Sequence
  Antisense nucleotide
agaacaaagaagagcc

SEQ ID NO: 2374 - DNA, 18 bp, Artificial Sequence
  Antisense nucleotide
caagagaacaaagaagag

SEQ ID NO: 2375 - DNA, 16 bp, Artificial Sequence
  Antisense nucleotide
cagcaagagaacaaag

SEQ ID NO: 2376 - DNA, 14 bp, Artificial Sequence
  Antisense nucleotide
tcctcagcaagaga

SEQ ID NO: 2377 - DNA, 14 bp, Artificial Sequence
  Antisense nucleotide
aggtgtgacttgca

SEQ ID NO: 2378 - DNA, 16 bp, Artificial Sequence
  Antisense nucleotide
gaataggtgtgacttg

SEQ ID NO: 2379 - DNA, 16 bp, Artificial Sequence
  Antisense nucleotide
cagaataggtgtgact

SEQ ID NO: 2380 - DNA, 14 bp, Artificial Sequence
  Antisense nucleotide
gcagaataggtgtg

SEQ ID NO: 2381 - DNA, 16 bp, Artificial Sequence
  Antisense nucleotide
cagttgcagaataggt

SEQ ID NO: 2382 - DNA, 16 bp, Artificial Sequence
  Antisense nucleotide
gaaaccatttctgacc

SEQ ID NO: 2383 - DNA, 18 bp, Artificial Sequence
  Antisense nucleotide
tgtgaaaccatttctgac

SEQ ID NO: 2384 - DNA, 18 bp, Artificial Sequence
  Antisense nucleotide
cactgtgaaaccatttct

SEQ ID NO: 2385 - DNA, 14 bp, Artificial Sequence
  Antisense nucleotide
ccactgtgaaacca

SEQ ID NO: 2386 - DNA, 30 bp, Artificial Sequence; identical to SEQ ID NO: 1227
  Antisense nucleotide

SEQ ID NO: 2387 - DNA, 15 bp, Artificial Sequence
  Antisense nucleotide
cacctccattcaccc

SEQ ID NO: 2388 - DNA, 16 bp, Artificial Sequence
  Antisense nucleotide
cagtaaaagtgtctgc

SEQ ID NO: 2389 - DNA, 18 bp, Artificial Sequence
  Antisense nucleotide
cgacattcagtaaaagtg

SEQ ID NO: 2390 - DNA, 14 bp, Artificial Sequence
  Antisense nucleotide
gaccgacattcagt

SEQ ID NO: 2391 - DNA, 18 bp, Artificial Sequence
  Antisense nucleotide
cttctggagataactaga

SEQ ID NO: 2392 - DNA, 18 bp, Artificial Sequence
  Antisense nucleotide
catcttattcctttccct

SEQ ID NO: 2393 - DNA, 16 bp, Artificial Sequence
  Antisense nucleotide
cagccatcttattcct

SEQ ID NO: 2394 - DNA, 16 bp, Artificial Sequence
  Antisense nucleotide
tgcagccatcttattc

SEQ ID NO: 2395 - DNA, 15 bp, Artificial Sequence
  Antisense nucleotide
gagtgtatcagtcag

SEQ ID NO: 2396 - DNA, 14 bp, Artificial Sequence
  Antisense nucleotide
ggagtgtatcagtc

SEQ ID NO: 2397 - DNA, 16 bp, Artificial Sequence
  Antisense nucleotide
cttggagtgtatcagt

SEQ ID NO: 2398 - DNA, 14 bp, Artificial Sequence
  Antisense nucleotide
acagagtacctacc

SEQ ID NO: 2399 - DNA, 16 bp, Artificial Sequence
  Antisense nucleotide
ccaactttcccttaag

SEQ ID NO: 2400 - DNA, 16 bp, Artificial Sequence
  Antisense nucleotide
ccttatgctcaatctc

SEQ ID NO: 2401 - DNA, 14 bp, Artificial Sequence
  Antisense nucleotide
gtcttactcaaggg

SEQ ID NO: 2402 - DNA, 16 bp, Artificial Sequence
  Antisense nucleotide
acagtcttactcaagg

SEQ ID NO: 2403 - DNA, 18 bp, Artificial Sequence
  Antisense nucleotide
cataagacacagtcttac

SEQ ID NO: 2404 - DNA, 18 bp, Artificial Sequence
  Antisense nucleotide
gaaagcataagacacagt

SEQ ID NO: 2405 - DNA, 16 bp, Artificial Sequence
  Antisense nucleotide
ggaaagcataagacac

SEQ ID NO: 2406 - DNA, 16 bp, Artificial Sequence
  Antisense nucleotide
agggataaaggaaagc

SEQ ID NO: 2407 - DNA, 14 bp, Artificial Sequence
  Antisense nucleotide
cctgtatacagagg

SEQ ID NO: 2408 - DNA, 16 bp, Artificial Sequence
  Antisense nucleotide
tgtctcctgtatacag

SEQ ID NO: 2409 - DNA, 16 bp, Artificial Sequence
  Antisense nucleotide
catcttctagttggtc

SEQ ID NO: 2410 - DNA, 16 bp, Artificial Sequence
  Antisense nucleotide
ctcatcttctagttgg

SEQ ID NO: 2411 - DNA, 18 bp, Artificial Sequence
  Antisense nucleotide
cttctcatcttctagttg

SEQ ID NO: 2412 - DNA, 16 bp, Artificial Sequence
  Antisense nucleotide
caaagcagacttctca

SEQ ID NO: 2413 - DNA, 14 bp, Artificial Sequence
  Antisense nucleotide
ctgcaaagcagact

SEQ ID NO: 2414 - DNA, 18 bp, Artificial Sequence
  Antisense nucleotide
ctagtttttccttctcct

SEQ ID NO: 2415 - DNA, 18 bp, Artificial Sequence
  Antisense nucleotide
tctagtttttccttctcc

SEQ ID NO: 2416 - DNA, 16 bp, Artificial Sequence
  Antisense nucleotide
caggatgaactctagt

SEQ ID NO: 2417 - DNA, 14 bp, Artificial Sequence
  Antisense nucleotide
cgagaacatcatgg

SEQ ID NO: 2418 - DNA, 14 bp, Artificial Sequence
  Antisense nucleotide
gtagtaggaaaggc

SEQ ID NO: 2419 - DNA, 14 bp, Artificial Sequence
  Antisense nucleotide
ggtagtaggaaagg

SEQ ID NO: 2420 - DNA, 14 bp, Artificial Sequence
  Antisense nucleotide
ggaatggtagtagg

SEQ ID NO: 2421 - DNA, 15 bp, Artificial Sequence
  Antisense nucleotide
ggtcattgagaagag

SEQ ID NO: 2422 - DNA, 16 bp, Artificial Sequence
  Antisense nucleotide
gctaatgttcttgacc

SEQ ID NO: 2423 - DNA, 15 bp, Artificial Sequence
  Antisense nucleotide
gtcaggaatcggcag

SEQ ID NO: 2424 - DNA, 16 bp, Artificial Sequence
  Antisense nucleotide
cttggagaagacatac

SEQ ID NO: 2425 - DNA, 14 bp, Artificial Sequence
  Antisense nucleotide
tgcctccccagaag

SEQ ID NO: 2426 - DNA, 17 bp, Artificial Sequence
  Antisense nucleotide
cactggcagtagaaatc

SEQ ID NO: 2427 - DNA, 15 bp, Artificial Sequence
  Antisense nucleotide
gctcactggcagtag

SEQ ID NO: 2428 - DNA, 14 bp, Artificial Sequence
  Antisense nucleotide
atggtcaggaatcg

SEQ ID NO: 2429 - DNA, 16 bp, Artificial Sequence
  Antisense nucleotide
gaatggtcaggaatcg

SEQ ID NO: 2430 - DNA, 14 bp, Artificial Sequence
  Antisense nucleotide
catcgtggactgtg

SEQ ID NO: 2431 - DNA, 14 bp, Artificial Sequence
  Antisense nucleotide
agccatggagatag

SEQ ID NO: 2432 - DNA, 15 bp, Artificial Sequence
  Antisense nucleotide
cagccatggagatag

SEQ ID NO: 2433 - DNA, 16 bp, Artificial Sequence
  Antisense nucleotide
acagccatggagatag

SEQ ID NO: 2434 - DNA, 17 bp, Artificial Sequence
  Antisense nucleotide
cacagccatggagatag

SEQ ID NO: 2435 - DNA, 16 bp, Artificial Sequence
  Antisense nucleotide
ccacagccatggagat

SEQ ID NO: 2436 - DNA, 14 bp, Artificial Sequence
  Antisense nucleotide
gccatggagatagg

SEQ ID NO: 2437 - DNA, 15 bp, Artificial Sequence
  Antisense nucleotide
agccatggagatagg

SEQ ID NO: 2438 - DNA, 16 bp, Artificial Sequence
  Antisense nucleotide
cagccatggagatagg

SEQ ID NO: 2439 - DNA, 17 bp, Artificial Sequence
  Antisense nucleotide
acagccatggagatagg

SEQ ID NO: 2440 - DNA, 14 bp, Artificial Sequence
  Antisense nucleotide
catggagatagggt

SEQ ID NO: 2441 - DNA, 15 bp, Artificial Sequence
  Antisense nucleotide
catggagatagggtg

SEQ ID NO: 2442 - DNA, 16 bp, Artificial Sequence
  Antisense nucleotide
catggagatagggtgg

SEQ ID NO: 2443 - DNA, 14 bp, Artificial Sequence
  Antisense nucleotide
atggagatagggtg

SEQ ID NO: 2444 - DNA, 15 bp, Artificial Sequence
  Antisense nucleotide
atggagatagggtgg

SEQ ID NO: 2445 - DNA, 16 bp, Artificial Sequence
  Antisense nucleotide
atggagatagggtggc

SEQ ID NO: 2446 - DNA, 17 bp, Artificial Sequence
  Antisense nucleotide
atggagatagggtggct

SEQ ID NO: 2447 - DNA, 14 bp, Artificial Sequence
  Antisense nucleotide
ggagatagggtggc

SEQ ID NO: 2448 - DNA, 15 bp, Artificial Sequence
  Antisense nucleotide
ggagatagggtggct

SEQ ID NO: 2449 - DNA, 14 bp, Artificial Sequence
  Antisense nucleotide
gaaatagcccaggc

SEQ ID NO: 2450 - DNA, 15 bp, Artificial Sequence
  Antisense nucleotide
gaaatagcccaggcg

SEQ ID NO: 2451 - DNA, 17 bp, Artificial Sequence
  Antisense nucleotide
gaaatagcccaggcgag

SEQ ID NO: 2452 - DNA, 14 bp, Artificial Sequence
  Antisense nucleotide
ggaaatagcccagg

SEQ ID NO: 2453 - DNA, 15 bp, Artificial Sequence
  Antisense nucleotide
ggaaatagcccaggc

SEQ ID NO: 2454 - DNA, 14 bp, Artificial Sequence
  Antisense nucleotide
gtcttcacatcgac

SEQ ID NO: 2455 - DNA, 15 bp, Artificial Sequence
  Antisense nucleotide
gtcttcacatcgact

SEQ ID NO: 2456 - DNA, 16 bp, Artificial Sequence
  Antisense nucleotide
gtcttcacatcgactt

SEQ ID NO: 2457 - DNA, 17 bp, Artificial Sequence
  Antisense nucleotide
gtcttcacatcgacttt

SEQ ID NO: 2458 - DNA, 18 bp, Artificial Sequence
  Antisense nucleotide
gtcttcacatcgactttg

SEQ ID NO: 2459 - DNA, 18 bp, Artificial Sequence
  Antisense nucleotide
gtcttcacatcgactttg

SEQ ID NO: 2460 - DNA, 18 bp, Artificial Sequence
  Antisense nucleotide
ccatttgtctgtcttcac

SEQ ID NO: 2461 - DNA, 18 bp, Artificial Sequence
  Antisense nucleotide
attaccgtctaccctgat
